(19) United States
(12) Patent Application Publication
(10) Pub. No.: US 2025/0099576 A1
(43) Pub. Date: Mar. 27, 2025

(54) Recombinant RNA Molecules Comprising Untranslated Regions or Segments Encoding Spike Protein from the Omicron Strain of Severe Acute Respiratory Coronavirus-2

(71) Applicant: GlaxoSmithKline Biologicals SA, Rixensart (BE)

(72) Inventors: Giulietta MARUGGI, Rockville, MD (US); Kambiz MOUSAVI, Rockville, MD (US); Newton WAHOME, Rockville, MD (US); Jason William WESTERBECK, Rockville, MD (US); Magdalena Aleksandra ZWIERZYNA, Siena (IT); Yoo-Ah KIM, Rockville, MD (US); Amirali YAZDI, Wavre (BE); Yamina BENNASSER, Rockville, MD (US)

(73) Assignee: GlaxoSmithKline Biologicals SA, Rixensart (BE)

(21) Appl. No.: 18/964,896

(22) Filed: Dec. 2, 2024

Related U.S. Application Data
(63) Continuation of application No. PCT/IB2023/056264, filed on Jun. 16, 2023.
(60) Provisional application No. 63/353,568, filed on Jun. 18, 2022.
(60) Provisional application No. 63/413,844, filed on Oct. 6, 2022.
(60) Provisional application No. 63/380,640, filed on Oct. 24, 2022.

(51) Int. Cl. A61K 39/215; A61K 9/51; A61K 39/00; C07K 14/005; C07K 16/10; C12P 19/34

(52) U.S. Cl. CPC A61K 39/215; A61K 9/5123; C07K 14/005; C07K 16/1003; C12P 19/34; A61K 2039/505; A61K 2039/53; A61K 2039/55555; C07K 2317/76; C12N 2770/20022; C12N 2770/20034

(57) ABSTRACT

Provided herein are 3′ and 5′ UTRs that provide an amount, duration, or both of protein expression from a recombinant RNA. Compositions of matter, methods, or uses of said 3′ and 5′ UTRs are provided. Provided herein are RNA segments that encode a SARS-CoV-2 omicron spike protein, which provide for omicron-strain-specific immunogenic compositions. Compositions of matter, methods, or uses of said RNA segments that encode a SARS-CoV-2 omicron spike protein are provided.

### CROSS-REFERENCE TO RELATED APPLICATIONS

[0001] This application claims the priority under Article 8(1) to: U.S. Provisional Application No. 63/353,568, filed Jun. 18, 2022; U.S. Provisional Application No. 63/413,844, filed Oct. 5, 2022; and U.S. Provisional Application No. 63/380,640, filed Oct. 24, 2022. The complete contents of the above-listed applications are hereby incorporated herein by reference in their entireties for all purposes.

### SEQUENCE LISTING

[0002] The instant application contains a Sequence Listing, which has been submitted electronically in computer readable form in an XML format and is hereby incorporated by reference in its entirety. Said XML file, created on Jun. 15, 2023, is named “70039Wo01_SL_1.xml” and is 1,039,811 bytes in size.

### BACKGROUND OF THE INVENTION

### Field of the Invention

[0003] Provided herein are compositions, methods, and uses that deliver an ribonucleic acid encoding a protein, and cause expression the protein, including those that elicit an immune response. These compositions, methods, and uses comprise a recombinant RNA comprising 3′ and 5′ UTRs. Independently provided herein are compositions, methods, and uses that elicit an immune response against the severe acute respiratory coronavirus 2 (SARS-CoV-2) omicron (a.k.a. strain B1.1.529) including the three sub-strains BA.1 (a.k.a. B.1.1.529.1), BA.1.1 (a.k.a. B.1.1.529.1.1), BA.2 (a.k.a. B.1.1.529.2), and BA.3 (a.k.a. B.1.1.529.3).

### Further Background

[0004] Ribonucleic acid-based (RNA-based) vaccines have emerged as the modality of choice for immunizing against severe acute respiratory coronavirus-2 (SARS-CoV2), the virus that caused the coronavirus disease 2019 (COVID-19). As of March 2022, COVID-19 has resulted in over six million deaths worldwide, with over 960,000 in the United States and 1,860,000 in Europe. As the waves of infections from the delta and omicron impacted the population, it was determined that the neutralizing antibody titers from the primary immunizations were not sufficient to fully prevent infections the newly emerging strains and to protect against reinfection. Boosting with messenger RNA encoding the earlier strains (i.e. the original strain identified in Wuhan, China (Wuhan-strain)) became a strategy, which, for example, increased neutralizing antibody titers and thereby protection. However, the elevations in neutralizing antibody after boosting last between two to four months and thereafter, the levels drop below those thought necessary to provide best protection. Rates of prevention by the earlier generations of vaccines are diminishing as newer strains emerge. It is possible that as the virus mutates into newer and more predominant strains, it will escape the preventative influence of the first-generation of vaccines that are based on said earlier strains. There remains a need for omicron-strain-specific immunogenic compositions.

[0005] Also needed are modifications to the backbone of the mRNA to provide for a durable immune response. Said modifications to the backbone may be provided independently of the omicron-specific modifications or in combination therewith.

[0006] The RNA, such as in vaccines, contain a segment that encodes a gene of interest (i.e. a segment that encodes a heterologous polypeptide or a segment that encodes an immunogen, e.g. a segment that encodes coronavirus spike protein), a 5′ untranslated region (5′ UTR), an optional 3′ untranslated region (3′ UTR), an optional 3′ poly(adenosine monophosphate) (3′ poly(A)) tail, and an optional 5′ cap.

[0007] The 5′ UTR is upstream (i.e. 5′) of the gene of interest; whereas, the 3′ UTR is downstream (i.e. 3′) of the gene of interest. The 5′ UTR begins at the transcription start site and ends one nucleotide before the translation initiation sequence (i.e. a sequence of 5′-adenosine, uridine, guanosine-3′ (5′-AUG-3′)) of the coding region of the gene of interest. The 5′ UTR can thereby affect the expression of the gene of interest through a range of intracellular mechanisms, including but not limited to pre-initiation complex regulation, closed-loop regulation, upstream open reading frame regulations (i.e. reinitiation), internal ribosome entry sites, microRNA binding sites, and others, which may operate in combination with the 5′ cap. The 3′ UTR follows the translation termination codon of the coding region of the gene of interest. The 3′ UTR may provide regulation regions that post-transcriptionally influence gene expression, including translation efficiency (i.e. AU-rich elements (AREs)), localization, stability of the RNA, polyadenylation, and circularization of the RNA to promote translation through interactions with the 5′ UTR and native cellular proteins such as poly(A) binding proteins (PABP). In summary, both the 3′ and 5′ UTR influence expression of the coding region of the gene of interest, and thereby the protein, through a variety of mechanisms.

[0008] As noted above, neutralizing antibody levels against SARS-CoV-2 drop below levels that are thought to provide best protection about 2-4 months after boosting with antigens derived from the Wuhan strain. Applicant suggests this duration might be due to the profile of antigen expression after primary or boosting vaccinations. Applicant suggests that UTRs are needed, which increase the amount of protein expressed, duration of protein expression, or both (i.e. area under the curve) from the gene of interest that is delivered by a recombinant RNA molecule.

### BRIEF SUMMARY OF THE INVENTION

[0009] In one aspect, the inventors discovered 3′ and 5′ UTRs that provide such amount, duration, or both of protein expression from a recombinant RNA. In another aspect, the inventors discovered RNA segments that encode SARS-CoV-2 omicron spike proteins, which provide for omicron-strain-specific immunogenic compositions. Accordingly, the inventors researched and identified the following aspects and embodiments, including the following compositions of matter, methods, or uses:

[0010] A recombinant ribonucleic acid (RNA) molecule comprising a 5′ untranslated region (5′ UTR), a segment that encodes a heterologous polypeptide, a 3′ untranslated region (3′ UTR), and a 3′ poly(adenosine monophosphate) (poly(A)) tail; wherein:
[0011] a) the 5′ UTR is 5′ of the segment that encodes the heterologous polypeptide;
[0012] b) the 3′ UTR is 3′ of the segment that encodes the heterologous polypeptide;
[0013] c) the 3′ poly(A) is 3′ of the 3′ UTR; and
[0014] d) i) the 5′ UTR comprises a sequence that has at least 95% identity to SEQ ID NO: 5 and the 3′ UTR comprises a sequence that has at least 95% identity to SEQ ID NO: 6;
   [0015] ii) the 5′ UTR comprises a sequence that has at least 95% identity to SEQ ID NO: 7 and the 3′ UTR comprises a sequence that has at least 95% identity to SEQ ID NO: 8; or
   [0016] iii) the 5′ UTR comprises a sequence that has at least 95% identity to SEQ ID NO: 13 and the 3′ UTR a sequence that has at least 95% identity to SEQ ID NO: 14.

[0017] A formulation comprising lipid nanoparticles (LNPs) and recombinant RNA molecules of any one of the preceding claims; wherein:
[0018] i) the LNPs comprise lipids;
[0019] ii) the lipids comprise first lipids and cholesterol;
[0020] iii) the first lipid comprises a tertiary amine and has a pKa from 5.0 to 7.6;
[0021] iv) at least half of the first lipids are neutrally charged when the first lipids are at a pH that is above the pKa; and
[0022] v) at least half of the first lipids are positively charged when the first lipids are at a pH that is below the pKa.

[0023] A method of eliciting an immune response against the immunogen in a subject, the method comprising administering to the subject an effective amount to elicit the immune response of the recombinant RNA molecule or the formulation.

[0024] A method of manufacturing the recombinant RNA molecule, the method comprising admixing an RNA polymerase, triphosphate nucleotides, and a template nucleic acid comprising a sequence of the recombinant RNA molecule, thereby obtaining an admixture; the admixing being under conditions wherein the RNA polymerase produces the recombinant RNA molecule from the template nucleic acid.

[0025] A method of manufacturing the formulation, the method comprising:
[0026] a. admixing the recombinant RNA molecules with an aqueous buffer, thereby obtaining an aqueous recombinant RNA solution;
[0027] b. admixing the lipids in an organic solvent, thereby obtaining a lipid solution;
[0028] c. admixing the lipid solution and the recombinant RNA solution with at least a T-mixer, a microfluidics mixer, or an impinging jet mixer, thereby obtaining a first solution, wherein the first solution comprises the LNPs, wherein at least some of the recombinant RNA molecules are encapsulated in the LNPs; and
[0029] d. purifying the LNPs to obtain the at least 80% of the recombinant RNA molecules being encapsulated by the LNPs.

[0030] A use of the recombinant RNA molecule for the manufacture of a medicament for delivering the segment that encodes the heterologous polypeptide, the method comprising admixing the recombinant RNA molecule with a pharmaceutically acceptable vehicle.

[0031] A use of the recombinant RNA molecule for the manufacture of a medicament for preventing a disease caused by a pathogen, the pathogen comprising the immunogen; the use comprising admixing the recombinant RNA molecule with a pharmaceutically acceptable delivery vehicle.

[0032] A use of the recombinant RNA molecule for the manufacture of a medicament for treating a disease caused by a pathogen, the pathogen comprising the immunogen; the use comprising admixing the recombinant RNA molecule with a pharmaceutically acceptable delivery vehicle.

[0033] A use of the formulation for the manufacture of a medicament for delivering a segment that encodes the heterologous polypeptide, the method comprising admixing the formulation with a pharmaceutically acceptable vehicle.

[0034] A use of formulation for the manufacture of a medicament for preventing a disease caused by a pathogen, the pathogen comprising the immunogen; the use comprising admixing the formulation with a pharmaceutically acceptable delivery vehicle.

[0035] A use of the formulation for the manufacture of a medicament for treating a disease caused by a pathogen, the pathogen comprising the immunogen; the use comprising admixing the formulation with a pharmaceutically acceptable delivery vehicle.

[0036] A composition for use in preventing infection by a pathogen in a subject, the composition comprising (A) a pharmaceutically acceptable vehicle and (B)(i) the recombinant RNA molecule or (B)(ii) the formulation; the pathogen comprising the immunogen.

[0037] A composition for use in eliciting an immune response against a pathogen in a subject, the composition comprising (A) a pharmaceutically acceptable vehicle and (B)(i) the recombinant RNA molecule or (B)(ii) the formulation; the pathogen comprising the immunogen.

[0038] A composition for use in treating infection by a pathogen in a subject, the composition comprising (A) a pharmaceutically acceptable vehicle and (B)(i) the recombinant RNA molecule or (B)(ii) the formulation; the pathogen comprising the immunogen.

[0039] A recombinant RNA molecule comprising a first sequence or a second sequence, wherein the first sequence has at least 90% identity to SEQ ID NO: 29 and the second sequence has at least 97% identity to SEQ ID NO: 30.

[0040] A formulation comprising lipid nanoparticles (LNPs) and recombinant RNA molecules; wherein:
[0041] i) the LNPs comprise lipids;
[0042] ii) the lipids comprise first lipids and cholesterol;
[0043] iii) the first lipid comprises a tertiary amine and has a pKa from 5.0 to 7.6;
[0044] iv) at least half of the first lipids are neutrally charged when the first lipids are at a pH that is above the pKa; and
[0045] v) at least half of the first lipids are positively charged when the first lipids are at a pH that is below the pKa.

[0046] A method of eliciting an immune response against the immunogen in a subject, the method comprising administering to the subject an effective amount to elicit the immune response of the recombinant RNA molecule or the formulation.

[0047] A method of manufacturing the recombinant RNA molecule, the method comprising admixing an RNA polymerase, triphosphate nucleotides, and a template nucleic acid comprising a sequence of the recombinant RNA molecule, thereby obtaining an admixture; the admixing being under conditions wherein the RNA polymerase produces the recombinant RNA molecule from the template nucleic acid.

[0048] A method of manufacturing the formulation, the method comprising:
[0049] a. admixing the recombinant RNA molecules with an aqueous buffer, thereby obtaining an aqueous recombinant RNA solution;
[0050] b. admixing the lipids in an organic solvent, thereby obtaining a lipid solution;
[0051] c. admixing the lipid solution and the recombinant RNA solution with at least a T-mixer, a microfluidics mixer, or an impinging jet mixer, thereby obtaining a first solution, wherein the first solution comprises the LNPs, wherein at least some of the recombinant RNA molecules are encapsulated in the LNPs; and
[0052] d. purifying the LNPs to obtain the at least 80% of the recombinant RNA molecules being encapsulated by the LNPs.

[0053] A use of the recombinant RNA molecule for the manufacture of a medicament for preventing coronavirus disease-2019 (COVID-19); the use comprising admixing the recombinant RNA molecule with a pharmaceutically acceptable delivery vehicle.

[0054] A use of the recombinant RNA molecule for the manufacture of a medicament for reducing the likelihood of at least one symptom of COVID-19; the use comprising admixing the recombinant RNA molecule with a pharmaceutically acceptable delivery vehicle.

[0055] A use of formulation for the manufacture of a medicament for preventing COVID-19; the use comprising admixing the formulation with a pharmaceutically acceptable delivery vehicle.

[0056] A use of the formulation for the manufacture of a medicament for reducing the likelihood of at least one symptom of COVID-19; the use comprising admixing the recombinant RNA molecules with a pharmaceutically acceptable delivery vehicle.

### DESCRIPTION OF DRAWINGS

[0057] The detailed description of preferred embodiments of the invention will be better understood when read in conjunction with the appended drawings. For the purpose of illustrating the invention, the drawings show certain, but not all, preferred embodiments. It should be understood that embodiments of the invention are not limited to the precise arrangements and instrumentalities of those shown in the drawings.

[0058] FIG. 1 shows the percent of baby hamster kidney (BHK) cells expressing firefly luciferase from transfected mRNA under the control of the following human UTRs: beta-actin gene (ACTB, Accession NO: NM_001101.5; SEQ ID NOs: 15 & 16), albumin gene (ALB or UTR1, Accession NOs: NG_056261.1 & NM_000477.7; SEQ ID NOs: 1 & 2), adenosine triphosphate (ATP) synthase beta subunit gene (ATPSB or UTR2, Accession NOs: AH002618.2 & NM_001686.4; SEQ ID NOs: 3 & 4), fibroblast activation protein messenger ribonucleic acid (mRNA) (FAP or UTR 3, SEQ ID NOs: 5 & 6, Accession NOs: U09278.2 & NM_001291807.3), H4 clustered histone 15 mRNA (HIST2H4A or UTR4, SEQ ID NOs: 7 & 8; Accession NO: NR_168448.1), glyceraldehyde-3-phosphate dehydrogenase gene (GAPDH or UTR5, Accession NOs: NG_007073.2 & NR_152150.2; SEQ ID NOs: 9 & 10), heat shock protein family A (Hsp70) member 8 gene (HSPA8 or UTR6, Accession NOs: NG_029473.1 & NM_153201.4; SEQ ID NOs: 11 & 12), interleukin-2 gene (IL-2 or UTR7; Accession NOs: AH002842.2 & NM_000586.4; SEQ ID NOs: 13 & 14), and transferrin gene (TF, Accession NO: NG_013080.2; SEQ ID NOs: 17 & 18), with untransfected mouse thymus cells and BHK cells as controls. BHK cells lack an innate immune response and thereby demonstrate gene expression from the UTR without inhibitory influence from the innate immune response. UTRs 3 and 4 stimulate firefly luciferase expression as well as ACTB UTR does when an innate immune response is not present. Beta actin is expressed ubiquitously in cells. Fluorescence was detected 18 hours after transfection. The mRNA had cap-0 capping and uridines, but no N1-methylpseudouridines.

[0059] FIG. 2 depicts the median fluorescent intensity of the BHK cells in FIG. 1.

[0060] FIG. 3 shows the total fluorescence intensity of all of the BHK cells as treated in FIG. 1 regardless of whether they expressed firefly luciferase or not.

[0061] FIG. 4 depicts the percent of human embryonic kidney 293 (HEK293) cells expressing firefly luciferase from transfected mRNA under the control of the following human UTRs: ACTB, UTRs1-7, TF, and eukaryotic translation elongation factor 2 (EEF2) mRNA (Accession NO: NM_001961.4; SEQ ID NOs: 19 & 20). Fluorescence was detected 18 hours after transfection. The mRNA had cap-0 capping and uridines, but no N1-methylpseudouridines. UTRs 2-6 outperformed ACTB UTRs in triggering more cells to express firefly luciferase.

[0062] FIG. 5 depicts the median fluorescent intensity of the HEK293 cells in FIG. 4.

[0063] FIG. 6 shows the total fluorescence intensity of all of the HEK293 cells as treated in FIG. 4 regardless of whether they expressed firefly luciferase or not.

[0064] FIG. 7 depicts the percent of human embryonic kidney 293 (HEK293) cells expressing firefly luciferase from transfected mRNA under the control of the following human UTRs: ACTB, UTRs1-7, TF, and eukaryotic translation elongation factor 2 (EEF2) mRNA (Accession NO: NM_001961.4). Fluorescence was detected 18 hours after transfection. The mRNA had cap-1 capping and N1-methylpseudouridines, but no uridines. UTRs 1, 2, 3, 4, 6, and 7 outperformed ACTB UTRs in triggering more cells to express firefly luciferase.

[0065] FIG. 8 depicts the median fluorescent intensity of the HEK293 cells in FIG. 7. At least cells treated with mRNA comprising UTRs 1, 2, 3, 4, 6, and 7, which drove firefly luciferase expression, expressed more firefly luciferase than those cells treated with mRNA comprising ACTB UTRs, which drove firefly luciferase expression. Cells treated with mRNA comprising UTR 5 and EEF UTRs, which drove firefly luciferase expression, had expression that was equal to or greater than that of cells treated with mRNA comprising ACTB UTRs.

[0066] FIG. 9 shows the total fluorescence intensity of all of the HEK293 cells as treated in FIG. 7 regardless of whether they expressed firefly luciferase or not.

[0067] FIGS. 10 and 11 depict the dose response curve and area under the curve, respectively, of expression of spike protein from SARS-CoV-2 omicron strain encoded by 12.5 ng, 25 ng, 50 ng, and 100 ng of KM72 (SEQ ID NO: 64), KM64 (SEQ ID NO: 42), KM65 (SEQ ID NO: 44), KM61 (SEQ ID NO: 34), KM62 (SEQ ID NO: 37), or KM63 (SEQ ID NO: 40) RNA per well on the cell membrane surface of HEK293 cells. Three prime and 5′ UTR 4 (in KM62) and 3′ and 5′ UTR 7 (in KM63) drove cell membrane surface expression of SARS CoV-2 omicron spike protein as well as UTRs from CureVac's second SARS-CoV-2 candidate (SEQ ID NOs: 27 and 28, which were in KM72), BioNTech's BNT162b2 SARS-CoV-2 FDA-approved product (Accession NOs: NM_000558, OL521838, NM_001130, SEQ ID NOs: 19 and 20, which were in KM64), and Moderna's mRNA-1273 SARS-CoV-2 FDA-approved product (SEQ ID NOs: 23 and 24, which were in KM65). The SARS-COV-2 omicron spike protein mRNA sequences were the same across constructs and were designed using commercially available software that optimized only for a codon adaptation index of greater than or equal to 0.7.

[0068] FIGS. 12 and 13 show the dose response curve and area under the curve, respectively, of expression of whole cell spike protein from the same treatments as in FIGS. 10 and 11.

[0069] FIGS. 14 and 15 depict the dose response curve and area under the curve, respectively, of expression of spike protein from SARS-CoV-2 omicron strain encoded by 12.5 ng, 25 ng, 50 ng, and 100 ng of KM69 (SEQ ID NO: 56), KM70 (SEQ ID NO: 59), KM71 (SEQ ID NO: 62), or KM96 (SEQ ID NO: 94) RNA per well on the cell membrane surface of HEK293 cells. Three prime and 5′ UTR 4 (in KM 70) and 3′ and 5′ UTR 7 (in KM71) drove cell membrane surface expression of SARS CoV-2 omicron spike protein as well as a UTR from BioNTech's BNT162b2 SARS-CoV-2 FDA-approved product (in KM96). The SARS-COV-2 omicron spike protein mRNA sequences were the same across constructs and were designed using the CR2 algorithm.

[0070] FIGS. 16 and 17 show the dose response curve and area under the curve, respectively, of expression of whole cell spike protein from the same treatments as in FIGS. 14 and 15.

[0071] FIGS. 18 and 19 depict the dose response curve and area under the curve, respectively, of expression of spike protein from SARS-CoV-2 omicron strain encoded by 12.5 ng, 25 ng, 50 ng, and 100 ng of KM62 (SEQ ID NO:37), KM67 (SEQ ID NO:50), or KM70 (SEQ ID NO: 59) RNA per well on the cell membrane surface of HEK293 cells. Design with the CR1 (in KM67) and CR2 (in KM70) algorithms resulted in significantly more surface expression of SARS-CoV-2 omicron strain than achieved with CAI 0.7 (in KM62), a commercially available software that optimized only for a codon adaptation index of greater than or equal to 0.7. KM62, KM67, and KM70 comprise 5′ and 3′ UTR4.

[0072] FIGS. 20 and 21 show the dose response curve and area under the curve, respectively, of expression of whole cell spike protein from the same treatments as in FIGS. 18 and 19.

[0073] FIGS. 22 and 23 depict the dose response curve and area under the curve, respectively, of expression of spike protein from SARS-CoV-2 omicron strain encoded by 12.5 ng, 25 ng, 50 ng, and 100 ng of KM63 (SEQ ID NO: 40), KM68 (SEQ ID NO: 53), or KM71 (SEQ ID NO: 62) RNA per well on the cell membrane surface of HEK293 cells. Design with the CR1 (in KM68) and CR2 (in KM71) algorithms resulted in significantly more surface expression of SARS-CoV-2 omicron strain than achieved with CAI 0.7 (in KM63), a commercially available software that optimized only for a codon adaptation index of greater than or equal to 0.7. KM63, KM68, and KM71 comprise 5′ and 3′ UTR7.

[0074] FIGS. 24 and 25 show the dose response curve and area under the curve, respectively, of expression of whole cell spike protein from the same treatments as in FIGS. 22 and 23.

[0075] FIGS. 26 and 27 show the dose response curve of spike protein from SARS-CoV-2 Wuhan strain encoded by 12.5 ng, 25 ng, 50 ng, and 100 ng of VAC3 (SEQ ID NO: 96), KM87 (SEQ ID NO: 84), KM88 (SEQ ID NO: 87), KM89 (SEQ ID NO: 90), or JW48 (SEQ ID NO: 92) RNA per well on the cell membrane surface of HEK293 cells and on the whole cells, respectively. Three prime and 5′ UTRs 4 and 7 (in KM88 and KM89 respectively) drove cell membrane surface expression and whole cell expression of SARS CoV-2 Wuhan spike protein as well as UTRs from CureVac's second SARS-CoV-2 candidate (in VAC3) and Moderna's mRNA-1273 SARS-CoV-2 FDA-approved product (in JW48). The mRNA sequences for KM87, KM88, and KM89 that encoded SARS-CoV-2 Wuhan spike protein were the same and were designed using commercially available software that optimized only for a codon adaptation index of greater than or equal to 0.7. The mRNA sequence for JW48 that encoded SARS-CoV-2 Wuhan spike protein were designed using IDT's online codon optimization tool. The mRNA sequences for VAC3 that encoded SARS-CoV-2 Wuhan spike protein were obtained from positions 17-3838 of the sequence in The World Health Organization: International Nonproprietary Names Programme. Messenger RNA Encoding the Full-Length SARS-CoV-2 Spike Glycoprotein; p. 11868, which is further described in Edo Kon, Uri Elia, and Dann Peer, “Principles for designing an optimal mRNA lipid nanoparticle vaccine,” Curr. Opin. Biotechnol. 2022, 73:329-336.

[0076] FIG. 28 depicts the dose response curve of angiotensin-converting enzyme 2 (ACE2) protein binding with SARS-CoV-2 Wuhan spike protein, which was expressed and released from HEK293 cells administered 62.5 ng, 125 ng, 250 ng, and 500 ng of VAC3 (SEQ ID NO: 96), KM87 (SEQ ID NO: 84), KM88 (SEQ ID NO: 87), KM89 (SEQ ID NO: 90), or JW48 (SEQ ID NO: 92) RNA per well. Three prime and 5′ UTRs 4 and 7 (in KM88 and KM89 respectively) drove Wuhan spike protein expression as well as UTRs from CureVac's second SARS-CoV-2 candidate (in VAC3) and Moderna's mRNA-1273 SARS-CoV-2 FDA-approved product (in JW48).

[0077] FIGS. 29 and 30 show the dose response curve of spike protein from SARS-CoV-2 omicron strain encoded by 12.5 ng, 25 ng, 50 ng, and 100 ng of KM71 (SEQ ID NO: 62), KM68 (SEQ ID NO: 53), KM70 (SEQ ID NO: 59), KM62 (SEQ ID NO: 37), KM65 (SEQ ID NO: 44), KM63 (SEQ ID NO: 40), KM66 (SEQ ID NO: 47), or KM61 (SEQ ID NO: 34) RNA per well on the cell membrane surface and the whole cell, respectively, of HEK293 cells. Encoding with CR1 (in KM68) and CR2 (in KM70 and 71) with 3′ and 5′ UTR4 (in KM70) and 3′ and 5′ UTR7 (in KM71 and KM68) drove significantly more cell membrane surface expression and whole cell expression of SARS CoV-2 omicron spike protein cell when compared to when the expression was driven by omicron spike protein sequences that were designed using commercially available software that optimized only for a codon adaptation index of greater than or equal to 0.7 and where the expression was driven by UTR3, UTR4, UTR7, and Moderna UTRs in mRNA-1273 SARS-CoV-2 FDA-approved product (in KM61, KM62, KM63, and KM65 respectively).

[0078] FIG. 31 depicts the dose response curve of angiotensin-converting enzyme 2 (ACE2) protein binding with SARS-CoV-2 Wuhan spike protein, which was expressed and released from HEK293 cells administered 62.5 ng, 125 ng, 250 ng, and 500 ng of KM71 (SEQ ID NO: 62), KM68 (SEQ ID NO: 53), KM70 (SEQ ID NO: 59), KM62 (SEQ ID NO: 37), KM65 (SEQ ID NO: 44), KM63 (SEQ ID NO: 40), KM66 (SEQ ID NO: 47), or KM61 (SEQ ID NO: 34) RNA per well. Encoding with CR1 (in KM68) and CR2 (in KM70 and 71) with 3′ and 5′ UTR4 (in KM70) and UTR7 (in KM71 and KM68) drove significantly more omicron spike protein expression as measured by ACE2 binding when compared to when the expression was driven by omicron spike protein sequences that were designed using commercially available software that optimized only for a codon adaptation index of greater than or equal to 0.7 and where the expression was driven by UTR3, UTR4, UTR7, and Moderna UTRs in mRNA-1273 SARS-CoV-2 FDA-approved product (in KM61, KM62, KM63, and KM65 respectively).

[0079] FIGS. 32, 33A, and 33B show the geometric mean IgG titers on day 14, day 21, and day 35 from female mice treated on day 0 and day 21 of the study with 5 μg, 1 pg, or 0.2 pg of KM65 (SEQ ID NO: 44), KM68 (SEQ ID NO: 53), KM70 (SEQ ID NO: 59), or KM71 (SEQ ID NO: 62) RNA encapsulated in RV39 LNPs. The individual points are the IgG titers from each individual animal. FIG. 32 organizes the geometric means by RNA treatment, then by dose, then by day of serum extraction for IgG titers. FIGS. 33A and 33B organize the geometric means by day of serum extraction, then by dose, then by RNA treatment. Treatment with RNA encoded by CR2 optimization of SARS-CoV-2 omicron spike protein, which is driven by UTR4, elicited higher IgG titers at days 14 and 21 than treatment with KM65, RNA encoding SARS-CoV-2 omicron spike protein optimized by commercially available software that optimized only for a codon adaptation index of greater than or equal to 0.7 and which was driven by Moderna UTRs in mRNA-1273 SARS-CoV-2 FDA-approved product. Treatment with RNA encoded by CR2 optimization of SARS-CoV-2 omicron spike protein, which is driven by UTR7, elicited higher IgG titers at days 14 and 21 at 5 μg doses and at day 35 at 5 μg and 0.2 μg than treatment with KM65, RNA encoding SARS-CoV-2 omicron spike protein optimized by commercially available software that optimized only for a codon adaptation index of greater than or equal to 0.7 and which was driven by Moderna UTRs in mRNA-1273 SARS-CoV-2 FDA-approved product. Treatment with RNA encoded by CR1 optimization of SARS-CoV-2 omicron spike protein, which is driven by UTR7, elicited higher IgG titers at days 21 and 35 at 1 μg doses than treatment with KM65, RNA encoding SARS-CoV-2 omicron spike protein optimized by commercially available software that optimized only for a codon adaptation index of greater than or equal to 0.7 and which was driven by Moderna UTRs in mRNA-1273 SARS-CoV-2 FDA-approved product.

[0080] FIGS. 34, 35A, and 35B depict neutralizing antibody titers (NT50) against a pseudovirus comprising SARS-CoV-2 omicron spike protein on days 21 and 35 of the same animals treated in FIGS. 32, 33A, and 33B. At day 21 and a dose of 0.2 μg, administration of KM70 elicited higher neutralizing antibody titers than administration of KM65, RNA encoding SARS-CoV-2 omicron spike protein optimized by commercially available software that optimized only for a codon adaptation index of greater than or equal to 0.7 and which was driven by Moderna UTRs in mRNA-1273 SARS-CoV-2 FDA-approved product. At day 23 and a dose of 1 μg, administration of KM71 or KM68 elicited higher neutralizing antibody titers than administration of KM65, RNA encoding SARS-CoV-2 omicron spike protein optimized by commercially available software that optimized only for a codon adaptation index of greater than or equal to 0.7 and which was driven by Moderna UTRs in mRNA-1273 SARS-CoV-2 FDA-approved product. At day 23 and a dose of 0.2 μg, administration of KM68 (SEQ ID NO: 53), KM70 (SEQ ID NO: 59), or KM71 (SEQ ID NO: 62) elicited higher neutralizing antibody titers than administration of KM65 (SEQ ID NO: 44), RNA encoding SARS-CoV-2 omicron spike protein optimized by commercially available software that optimized only for a codon adaptation index of greater than or equal to 0.7 and which was driven by Moderna UTRs in mRNA-1273 SARS-CoV-2 FDA-approved product.

[0081] FIGS. 36 and 37 show neutralizing antibody titers (NT50) against a pseudovirus comprising SARS-CoV-2 delta spike protein on day 35 of the same animals treated in FIGS. 32, 33A, and 33B. At every dose, administration with KM68 (SEQ ID NO: 53), KM70 (SEQ ID NO: 59), or KM71 (SEQ ID NO: 62) elicited higher neutralizing antibody titers than administration of KM65 (SEQ ID NO: 44), RNA encoding SARS-CoV-2 omicron spike protein optimized by commercially available software that optimized only for a codon adaptation index of greater than or equal to 0.7 and which was driven by Moderna UTRs in mRNA-1273 SARS-CoV-2 FDA-approved product.

[0082] FIGS. 38 and 39 depict neutralizing antibody titers (NT50) against live SARS-CoV-2 virus on day 35 of the same animals treated in FIGS. 32, 33A, and 33B. Administration of KM68 (SEQ ID NO: 53), KM70 (SEQ ID NO: 59), or KM71 (SEQ ID NO: 62) elicited neutralizing antibodies (NT50) against live SARS-CoV-2 omicron virus at the same levels as those elicited by administration of KM65 (SEQ ID NO: 44), RNA encoding SARS-CoV-2 omicron spike protein optimized by commercially available software that optimized only for a codon adaptation index of greater than or equal to 0.7 and which was driven by Moderna UTRs in mRNA-1273 SARS-CoV-2 FDA-approved product.

[0083] FIGS. 40 and 41 show the dose response curve and area under the curve, respectively, of the HEK293 cell membrane surface expression of SARS-CoV-2 omicron spike protein encoded by 12.5 ng, 25 ng, 50 ng, and 100 ng of KM70 (SEQ ID NO: 59), where the length of the 3′ poly(A) tail consisted of 40 As, 60 As, 80 As, 100 As, 120 As, or 150 As.

[0084] FIGS. 42-45 depict the dose response curve of HEK293 cell membrane surface expression of SARS-CoV-2 omicron spike protein encoded by 12.5 ng, 25 ng, 50 ng, and 100 ng of KM65 (SEQ ID NO: 44), KM68 (SEQ ID NO: 53), KM70 (SEQ ID NO: 59), or KM71 (SEQ ID NO: 62) RNA, respectively, where the length of the 3′ poly(A) tail consisted of around 70 As (solid lines) or exactly 100 As (dotted lines).

[0085] FIG. 46 depicts the dose response curve of expression of spike protein from SARS-CoV-2 BA.1 omicron strain encoded by 10, 7, 3.5, 2.5, 1.75, 1.25, and 0.8765 ng/well the SARS-COV-2 BA.1 omicron spike protein mRNA sequences, optimized by codeRNA (CR) 2-7. Each construct incorporated the identical mRNA sequence for UTR4, differing only in the sequence encoding the BA.1 immunogen.

[0086] FIG. 47 depicts the dose response curve of expression of spike protein from SARS-CoV-2 BA.1 omicron strain encoded by 6.25, 12.5, 25, 50, 100, or 200 ng/well the SARS-COV-2 BA.1 omicron spike protein mRNA sequences, optimized by codeRNA (CR) 2-7. Each construct incorporated the identical mRNA sequence for UTR4, differing only in the sequence encoding the BA.1 immunogen.

[0087] FIG. 48 depicts the area under the curve (AUC) of spike protein from SARS-CoV-2 BA.1 omicron strain encoded by 6.25, 25, 50, 100, or 200 ng/well the SARS-COV-2 BA.1 omicron spike protein mRNA sequences, optimized by codeRNA (CR) 2-7 and with UTR 4 or UTR 7. Each construct incorporated the identical mRNA sequence for UTR4, differing only in the sequence encoding the BA.1 immunogen.

[0088] FIGS. 49 and 50 show statistically insignificant differences in serum levels of total IgG against anti-SARS-CoV2 BA.1 spike protein at day 14 (FIGS. 49 and 50) and at day 34 (FIG. 50) after the first administration of one of RNA constructs KM70, LL34, LL35, LL36, LL37, and LL38 formulated in RV39 at doses of 0.5 μg, 1 μg, or 5 μg to mice. A second administration of the same doses occurred at day 21 (21 days after the first dose (day 0)). Statistical significance was found in measures between saline treated and construct treated animals.

[0089] FIG. 51 shows statistically insignificant differences in serum levels of pseudovirus neutralization antibody titers at days 14 and 34, in the same mice treated with RNA constructs as in FIGS. 49 and 50. Statistical significance was found in measures between saline-treated and construct-treated animals.

[0090] FIG. 52. shows statistically insignificant differences in live virus neutralization antibody titers at day 34, in the serum of the same mice treated with RNA constructs as in FIGS. 49 and 50. Statistical significance was found in measures between saline-treated and construct-treated animals.

[0091] FIG. 53 shows the gating strategy for flow cytometry for cytokine analysis of T cells from a representative sample obtained from in vivo. Cytokines were gated on time/live/lymphocytes/singlets/CD3 CD4/CD44, or CD8/CD44. Phenotypic subsets were determined by the Boolean combination gate tool.

[0092] FIG. 54 depicts the flow cytometry gating scheme from a representative sample obtained from in vivo to identify follicular helper T cells (Tfh) cells. To measure total Tfh, cells were gated on time/live/lymphocytes/singlets/CD3/CD4/CD44/CXCR5+PD1+.

[0093] FIG. 55 shows statistically insignificant differences in SARS-COV-2 spike protein specific CD4-positive T cell responses at day 34 isolated from the spleens of the same mice treated with RNA constructs as in FIGS. 49 and 50. Statistical significance was found in measures between saline-treated and construct-treated animals.

[0094] FIG. 56 shows statistically insignificant differences in SARS-COV-2 spike protein specific CD8-positive T cell responses at day 34 isolated from the spleens of the same mice treated with RNA constructs as in FIGS. 49 and 50. Statistical significance was found in measures between saline-treated and construct-treated animals.

[0095] FIGS. 57A, 57B, 57C, 58A, and 58B show that HEK293 cells administered with LL59, LL60, LL61, LL62, LL66, or LL67 RNA construct had comparable whole cell spike protein expression 24 hrs (FIGS. 57A, 57B, 57C, 58A, and 58B) and 48 hrs (FIGS. 58A and 58B) after administration as measured by area under the curve of the dose response of 25, 50, 75, and 100 ng of RNA construct per well.

[0096] FIG. 59 show statistically insignificant differences in serum levels of total IgG against anti-SARS-CoV2 BA.5 spike protein at day 21 after the first administration of one of RNA constructs LL59 (a.k.a. KM70 prime), LL60, LL61, LL62, LL66, and LL67 formulated in RV39 at doses of 0.5 μg, 1 μg, or 5 μg to mice. A second administration of the same doses occurred at day 21 (21 days after the first dose (day 0)). Statistical significance was found in measures between saline treated and construct treated animals.

[0097] FIG. 60 shows that adding 5′ UTR7 and 3′ UTR4 into a construct, SP035, results in 2-2.45 higher area under the curve as obtained with LL59, which has 5′ UTR4 and 3′ UTR4. In both constructs, the 3′ poly(A) tail had 30 As, a linker, then 87 As.

### DETAILED DESCRIPTION OF THE INVENTION

[0098] The preferred materials and methods are described herein; any methods and materials similar or equivalent to those described herein can be used in the practice of or testing of the invention.

### Definitions

[0099] Unless defined otherwise, all technical and scientific terms herein have the same meaning as commonly understood by one of ordinary skill in the art. The following terminology will be used. It is also to be understood that the terminology used herein is for the purpose of describing particular embodiments only and is not intended to be limiting.

[0100] The articles “a” and “an” are used herein to refer to one or to more than one (i.e., to at least one) of the grammatical object of the article. By way of example, “an element” means one element and more than one element.

[0101] “Or” supports, contemplates, and when recited in the claims, claims “one or a combination of” as in “one or a combination of A, B, or C.” To illustrate, “A, B, or C” means A alone, B alone, C alone, the combination of A and B, the combination of A and C, the combination of B and C, and the combination of A, B, and C, unless otherwise illustrated. That is, “or” supports and contemplates “and” as in “and/or” wherein “and/or” includes any combinations within the list of alternatives without being limited solely to the combination of all alternatives in a list (i.e. “A, B, or C” includes “A and B” and is not limited to “A, B, and C”).

[0102] Furthermore, the recitation of a list of alternatives, which may be conjoined by “and” and from which at least one alternative is selected (e.g. Markush language), further contemplates and supports all combinations within the list of alternatives. For example, “X is selected from the group of: A, B, and C” contemplates and supports “X is selected from the group of: A, B, C, and combinations thereof,” “X is selected from at least one of the group of: A, B, and C,” and “X is selected from one or more of the group of: A, B, and C.” For further example, “X is selected from the group consisting of A, B, and C” contemplates and supports “X is selected from the group consisting of A, B, C, and combinations thereof,” “X is selected from at least one of the group consisting of A, B, and C,” or “X is selected from one or more of the group consisting of A, B, and C.”

[0103] Each of the following contemplates and supports any of the others: “comprises,” “consists of,” “consists essentially of,” “is/are/being,” “is selected from,” “is at least selected from,” “is selected from the group of,” “is selected from the group consisting of,” “is at least selected from the group consisting of,” “is from at least one of the group consisting of,” and “is from one or more of the group consisting of.” For example and in consideration of the above regarding combinations of listed elements, recitation of “X comprises an A, a B, or a C” in the specification contemplates and supports embodiments wherein “X consists of an A, a B, or a C,” “X consists of an A, a B, a C, or combinations thereof,” “X consists of one or more of an A, a B, or a C,” “X is one or more of an A, a B, or a C,” “X is an A, a B, a C, or combinations thereof,” “X is selected from an A, a B, or a C,” “X is selected from an A, a B, a C, or combinations thereof,” “X is selected from the group consisting of an A, a B, a C, and combinations thereof,” “X is selected from at least one of the group consisting of an A, a B, and a C,” or “X is selected from one or more of the group consisting of an A, a B, and a C.”

[0104] When a specific component of an embodiment is listed—e.g. “X comprises A, B, or C”-then also supported and contemplated are any embodiments which specifically exclude any individual or combinations of components—e.g. “X comprises A, but not B or C” or “X comprises A but does not comprise B or C.”

[0105] “About” as used herein when referring to a measurable value such as an amount, a temporal duration, a quantum of measurement, and the like, is meant to encompass variations of .+−.20% or .+−0.10%, more preferably .+−.5%, even more preferably .+−.1%, and still more preferably .+−.0.1% from the specified value, as such variations are appropriate to perform the disclosed methods.

[0106] The term “antibody,” as used herein, refers to an immunoglobulin molecule, which comprises three heavy-chain complementary-determining regions and three light-chain complementary-determining regions (collectively an antigen-determining region), and therefrom specifically binds with an antigen. An antibody can comprise the quintessential “Y” shaped immunoglobulin which comprises two arms and a stem and which comprises two heavy-chains and two light-chains. Each arm comprises a variable region which comprises said light-chain and heavy-chain complementary-determining regions, and each arm comprising a light-chain and a portion (C_{H}1 region) of the heavy-chain. Each stem comprises two portions of a heavy-chain, each portion comprising a C_{H}2 region and a C_{H}3 region. That is, antibodies can be intact immunoglobulins derived from natural sources or from recombinant sources and can be immunoreactive portions of intact immunoglobulins. Antibodies can also be fragments of said intact antibody, wherein the fragment comprises said three heavy-chain complementary-determining regions and said three light-chain complementary-determining regions (i.e. said antigen-determining regions), and therefrom specifically binds with an antigen. The antibodies may exist in a variety of forms including, for example, Fv, Fab, F(ab)₂, linear antibodies, and single chain antibodies (scFv). Antibodies can include polyclonal antibodies, monoclonal antibodies, humanized antibodies, human antibodies, bispecific antibodies, and multi-specific antibodies (Harlow et al., 1999, In: Using Antibodies: A Laboratory Manual, Cold Spring Harbor Laboratory Press, NY; Harlow et al., 1989, In: Antibodies: A Laboratory Manual, Cold Spring Harbor, N.Y.; Houston et al., 1988, Proc. Natl. Acad. Sci. USA 85:5879-5883; Bird et al., 1988, Science 242:423-426).

[0107] The term “conservative sequence modifications” within the context of amino acid sequences refers to amino acid modifications that do not significantly affect or alter the binding characteristics of the antigen, immunogen, protein, antibody, or antibody fragment containing the amino acid sequence. Such conservative modifications include amino acid substitutions, additions, and deletions. Modifications can be introduced into an antigen, an immunogen, a protein, an antibody, or an antibody fragment by, for example, site-directed mutagenesis and PCR-mediated mutagenesis. Conservative amino acid substitutions are ones in which the amino acid residue is replaced with an amino acid residue having a similar side chain. Similar side chains include categorization by substitution of and with basic side chains (e.g., lysine, arginine, histidine), acidic side chains (e.g., aspartic acid, glutamic acid), uncharged polar side chains (e.g., glycine, asparagine, glutamine, serine, threonine, tyrosine, cysteine, tryptophan), nonpolar side chains (e.g., alanine, valine, leucine, isoleucine, proline, phenylalanine, methionine), beta-branched side chains (e.g., threonine, valine, isoleucine), and aromatic side chains (e.g., tyrosine, phenylalanine, tryptophan, histidine).

[0108] “Sequence,” “segment,” “nucleic acid,” or “region” as used within the context of a nucleic acid includes sense (i.e. positive) and anti-sense (i.e. negative, e.g. reverse complementary) sequences of the same nucleic acid. A “segment,” “sequence,” “nucleic acid,” or “region” that “encodes” a coding sequence, wherein the coding sequence is transcribed and/or translated, includes sense and antisense (e.g. reverse complementary) sequences of the same nucleic acid. In some embodiments, the coding sequences encode a heterologous polypeptide. In some embodiments, the heterologous polypeptide comprises an immunogen (a.k.a. antigens). In some embodiments, the coding sequence encodes an antibody. In some embodiments, the antibody is an antibody against the immunogen or antigen. In some embodiments, the immunogen or antigen comprises a venom, a poison, an allergen, a cancer antigen, a bacterial antigen, a viral antigen, a fungal antigen, a parasite antigen, or a fragment thereof. That is, in some embodiments, the antibody against an immunogen or an antigen is an antibody against a venom, a poison, an allergen, a cancer antigen, a bacterial antigen, a viral antigen, a fungal antigen, a parasite antigen, or a fragment thereof. And in some embodiments, the coding sequence encodes an immunogen or an antigen, which is a venom, a poison, an allergen, a cancer antigen, a bacterial antigen, a viral antigen, a fungal antigen, a parasite antigen, or a fragment thereof.

[0109] In some embodiments, the coding sequence can encode a heterologous polypeptide, which has a therapeutic use. For example, a subject can be deficient in absolute or relative activity of the protein by, for example, having a defective coding region, regulatory region, or regulatory elements for the gene encoding the protein. The administered RNA can provide the coding sequences or regulatory elements therefor for said protein to compensate for said deficiency. In some embodiments, the heterologous polypeptide can comprise an immunotherapeutic molecule or an enzyme. In some embodiments, the enzyme comprises a galactose-1-phosphate uridylyltransferase (GALT) or acid sphingomyelinase, which would be administered to a subject having reduced or deficient activity for the native enzyme, i.e. someone having galactosemia or Neiman-Pick disease respectively.

[0110] In some embodiments, a “segment,” “sequence,” “nucleic acid,” or “region” that encodes a coding sequence, is a segment, sequence, or region that encodes an immunogen (a.k.a. antigen) or encodes a heterologous polypeptide. In some embodiments, the heterologous polypeptide includes an antibody. In this regard, to provide for such recombination, the terms “sequence that encodes an immunogen,” “sequence that encodes an antigen,” and “sequence that encodes a heterologous polypeptide” specifically must include a gene sequence other than: for SEQ ID NOs: 1 and 2, albumin gene sequence from any species; for SEQ ID NOs: 3 and 4, an adenosine triphosphate (ATP) synthase beta subunit (ATPSB) gene sequence from any species; for SEQ ID NOs: 5 and 6, a fibroblast activation protein alpha gene sequence from any species; for SEQ ID NOs: 7 and 8, a histone H4 gene sequence from any species, including H4 clustered histone 14 and 15; for SEQ ID NOs: 9 and 10, a glyceraldehyde-3-phosphate dehydrogenase (GAPDH) gene sequence from any species; for SEQ ID NOs: 11 and 12, a heat shock protein family A (Hsp70) member 8 (HSPA8) gene sequence from any species; and for SEQ ID NOs: 13 and 14, an interleukin-2 gene sequence from any species. As noted above, the recombinant RNA molecules can comprise a sequence that encodes a heterologous polypeptide. In this regard, the terms “recombination” and “heterologous” are at least provided by the inclusion of a gene sequence encoding a polypeptide in addition to and other than the above-noted gene sequences for the above-noted SEQ ID NOs: 1-14.

[0111] Likewise, a “segment,” “sequence,” “nucleic acid,” or “region” that “encodes” a non-coding sequence, such as miRNA or a promoter, also contemplates and supports sense and antisense (e.g. reverse complementary) sequences of the same nucleic acid. This contemplation and support of both sense and antisense strands for the segment, sequence, nucleic acid, or region is due to the property of a nucleic acid to undergo semi-conservative replication whereby genetic information is retained. In semi-conservative replication, the two strands of double-stranded nucleic acid are separated (i.e. melt or are separated by a helicase), and each of the two strands are used as a template from which a newly synthesized, reverse complementary strand is formed. That is, in semi-conservative replication, the genetic information, whether as sense or antisense is preserved, and a protein, immunogen, miRNA, or promoter, for example, may be produced from the initial strand or strands synthesized therefrom regardless of whether the initial strand is sense or antisense.

[0112] In some embodiments, the recombinant RNA can be a self-replicating RNA or a plurality of auto-amplifying RNA. Within the context of self-amplifying RNA and plurality of auto-amplifying RNA, semi-conservative replication provides for the propagation of, for example, the protein, immunogen, miRNA, or promoter regardless of whether the segment encoding the protein, immunogen, miRNA, or promoter was sense or antisense. In this regard, it is understood that the a self-replicating RNA or a plurality of auto-amplifying RNA can comprise one or more segments or sequences that encode one or more proteins necessary for replicating the a self-replicating RNA or a plurality of auto-amplifying RNA in an intracellular environment, and that these segments or sequences that encode the one or more proteins necessary for replicating the a self-replicating RNA or a plurality of auto-amplifying RNA in an intracellular environment are encoded in a sense or positive strand orientation. It is further understood that the a self-replicating RNA or a plurality of auto-amplifying RNA can further comprise a first RNA, wherein the first RNA comprises a heterologous nucleic acid, which in some embodiments can encode a heterologous polypeptide, and wherein the heterologous nucleic acid which in some overlapping embodiments comprises an inhibitory RNA, and it is further understood that the heterologous nucleic acid may be transcribed and translated from the antisense or negative strand of the a self-replicating RNA or a plurality of auto-amplifying RNA.

[0113] In this regard, the above-noted support and contemplation of sense and antisense strands applies not only to a self-replicating RNA or a plurality of auto-amplifying RNA, but also to the making and use of a conventional RNA, which is often transcribed from DNA and plasmids, which may encode sense or antisense information, depending upon the step of in the manufacture of the conventional RNA. In this regard, support and contemplation of sense and antisense strands applies not only to the manufacturing process, but also the conventional RNA itself by, for example, supporting and contemplating RNA encoding a therapeutic that can suppress gene expression such as by, for example, antisense RNA, siRNA, RNAi, miRNA, etc.

[0114] To illustrate how “sequence,” “segment,” “nucleic acid,” or “region” as used within the context of a nucleic acid includes sense (i.e. positive) and anti-sense, if a specific sequence, called “A”, is listed as having the sequence of 5′-ATGG-3′ in the sense strand (i.e. positive strand) then it is contemplated, supported, and when listed in the claims, claimed that A also has the sequence of 3′-TACC-5′ in the antisense strand (i.e. negative strand) or complementary strand (i.e. A comprises 5′-ATGG-3′ or 3′-TACC-5′).

[0115] As statements above provide, “sequence,” “region,” or “segment” as used herein, unless otherwise specified, also contemplates and supports sequences incorporating different forms of nucleic acids, i.e. RNA and DNA, of the same information, or sequences incorporating differing nucleotides found in the different forms of the nucleic acids (i.e. uridines in RNA and thymidines in DNA), as well as sense and anti-sense (e.g. reverse complementary) information therein. For example, RNA may be produced from plasmids of DNA, and thereby the sequence of the plasmid contemplates and supports the sequence of the RNA and vice versa. Since the substitution standard nucleotides with modified nucleotides are contemplated herein (i.e. the substitution of uridines with N1-methylpseudouridines (N1ψ) is contemplated herein), a sequence, region, or segment herein also contemplates and supports sequences incorporating analogs of the standard nucleotides (i.e. uridines) herein. To illustrate, if A in RNA (sense) is 5′-AUGG-3′, A also comprises 5′-ATGG-3′, being the sense DNA, and 3′-TACC-5′ being the anti-sense DNA, as well as 3′-UACC-5′, being the antisense RNA. To also illustrate, 5′-AUGG-3′ also supports and contemplates the sequence of 5′-A(N1ψ)GG-3′, as well as 3′-(N1ψ)ACC-5.′ To distinguish between sense and anti-sense (e.g. complementary) sequences, a prime symbol (′) may be used, i.e. for ease of tracking original genomic material, transcripts, first strand synthesis, second strand synthesis, sense, and antisense strands. To further illustrate, if a first single-stranded region comprises SEQ ID NO: 114, 5′-AATGATACGGCGACCACCGA-3′, then that first single-stranded region also supports and comprises SEQ ID NO: 115, 5′-TCGGTGGTCGCCGTATCATT-3′.

[0116] In some embodiments, a “first RNA segment” and a “second RNA segment” are provided. It is to be understood that the second RNA segment is not necessarily downstream (3′) of the first RNA segment or that it is not necessarily upstream (5′) of the first RNA segment either. “First” or “second” with regard to an “RNA segment” is not meant to connote the order along a stand-alone molecule, but rather “first” and “second” are used for nominative convenience. In some embodiments, “first” and “second” lipids are provided. In this regard, a “first” or “second” or any numbered thing is to be understood to use such numbering as to differentiate between said things. For example, a first and second mole percentage may be used to distinguish between the mole percentage of something in a molecule (i.e. the mole percentage of N1-methylpseudouridines to the total of the N1-methylpseudouridines and the uridines in a SAM RNA molecule) and the mole percentage of something in an admixture (i.e. the mole percentage of N1-methylpseudouridines to the total of the N1-methylpseudouridines and the uridines in an in vitro transcription reaction). This thereby avoids the use of determinative language in each and every instance of a term.

[0117] “Identity,” “homology,” and within this context, “percent identity” or “percent homology” take the following definitions depending upon whether it is an amino acid sequence or a nucleic acid sequence. “Identity” or “homology” (i.e. percent identity) with respect to an amino acid sequence is defined herein as the percentage of amino acid residues in the candidate sequence that are identical with the reference amino acid sequence after aligning the sequences and introducing gaps, if necessary, to achieve the maximum percent sequence identity, and not considering any conservative substitutions as part of the sequence identity.

[0118] “Identity” or “homology” (i.e. percent identity) with respect to a nucleic acid sequence is defined herein as the percentage of nucleotides in the candidate sequence that are identical with the reference nucleic acid sequence after aligning the sequences and introducing gaps, if necessary, to achieve the maximum percent sequence identity. The exchange of uridine and thymidine shall be equivalent (i.e. not taken into account) for calculating percent identity. The substitution of uridine or thymidine with a uridine- or thymidine-substitutable modified nucleotide (i.e. U substituted with N1ψ) shall be equivalent (i.e. not taken into account) for calculating percent identity. The substitution of adenosine with an adenosine-substitutable modified nucleotide shall be equivalent (i.e. not taken into account) for calculating percent identity. The substitution of guanosine with a guanosine-substitutable modified nucleotide shall be equivalent (i.e. not taken into account) for calculating percent identity. The substitution of cytosine with a cytosine-substitutable modified nucleotide shall be equivalent (i.e. not taken into account) for calculating percent identity. Where the present disclosure refers to a sequence by reference to a UniProt or Genbank accession code, the sequence referred to is the current version at the filing date of the earliest effective filing date.

[0119] “Nucleic acid,” “polynucleotide,” and “oligonucleotide” as used herein all have the same meaning and they are inherently composed of a sequence of nucleotides, each nucleotide comprising a phosphate and a nucleoside, a nucleoside comprising a pentose sugar (e.g. deoxyribose and ribose) and a nucleobase (e.g. a purine comprising adenine or guanine and a pyrimidine comprising cytosine, uracil, N1-methyluracil, and thymine). In some embodiments, the nucleoside (i.e. sugar and nucleobase) can be standard nucleosides (i.e. adenosine, deoxyadenosine, guanosine, deoxyguanosine, thymidine (a.k.a. deoxythymidine), uridine, deoxyuridine, cytidine, or deoxycytidine, or methylates thereof (i.e. 5′-methyluridine) or they may be modified nucleosides (i.e. pseudouridine (a.k.a. 5-(β-D-Ribofuranosyl)pyrimidine-2,4(1H,3H)-dione or 5-[(2S,3R,4S,5R)-3,4-Dihydroxy-5-(hydroxymethyl)oxolan-2-yl]pyrimidine-2,4(1H,3H)-dione, CAS No. 1445-07-4, PubChem CID 15047), N1-methyluridine, N1-methylpseudouridine (a.k.a. 5-[(2S,3R,4S,5R)-3,4-Dihydroxy-5-(hydroxymethyl)oxolan-2-yl]-1-methylpyrimidine-2,4-dione, CAS No. 13860-38-3, PubChem CID 99543), or deoxyribose-containing or ribose-containing forms thereof). In some embodiments, the modified nucleotides comprise hypoxanthine, inosine, 8-oxo-adenine, 7-substituted derivatives thereof, dihydrouracil, pseudouridine, N1-methylpseudouridine, 2-thiouracil, 4-thiouracil, 5-aminouracil, 5-(C1-C6)-alkyluracil, 5-methyluracil, 5-(C2-C6)-alkenyluracil, 5-(C2-C6)-alkynyluracil, 5-(hydroxymethyl)uracil, 5-chlorouracil, 5-fluorouracil, 5-bromouracil, 5-hydroxy cytosine, 5-(C1-C6)-alkylcytosine, 5-methylcytosine, 5-(C2-C6)-alkenylcytosine, 5-(C2-C6)alkynylcytosine, 5-chlorocytosine, 5-fluorocytosine, 5-bromocytosine, N2-dimethylguanine, 7-deazaguanine, 8-azaguanine, 7-deaza-7-substituted guanine, 7-deaza-7-(C2-C6)alkynylguanine, 7-deaza-8-substituted guanine, 8-hydroxyguanine, 6-thioguanine, 8-oxoguanine, 2-aminopurine, 2-amino-6-chloropurine, 2,4-diaminopurine, 2,6-diaminopurine, 8-azapurine, substituted 7-deazapurine, 7-deaza-7-substituted purine, 7-deaza-8-substituted purine, or hydrogen (abasic residue). A “nucleic acid,” “polynucleotide,” and “oligonucleotide” can be a stand-alone molecule (i.e. an RNA molecule) or they may be “region,” “sequence,” or “segment” therein, and in this regard, the use of “region,” “sequence,” or “segment” is used to distinguish between such and a stand-alone molecule.

[0120] The term “heterologous polypeptide” includes a heterologous glycoprotein of the heterologous polypeptide, a heterologous lipo-protein of the heterologous polypeptide, a heterologous lipo-glyco-protein of the heterologous polypeptide, and other terms for the protein that is the result of the post-translational modification of the heterologous polypeptide as translated. In this regard, the heterologous polypeptide may be translated from the segment that encodes the heterologous polypeptide once the recombinant RNA is in a cell. The translated heterologous polypeptide, as encoded by the segment that encodes the heterologous polypeptide, may have moieties to which post-translational modification adds the sugars, lipids, lipids and sugars, and other post-translational modifications. Accordingly, “the segment encodes a heterologous polypeptide” means and refers to a segment that encodes a heterologous polypeptide and post-translational products thereof, including glycoproteins thereof, lipoproteins thereof, lipo-glycoproteins thereof, and post-translational products thereof. The term “heterologous polypeptide” includes a pre-form and/or a pro-form of a biologically active molecule of the heterologous polypeptide and combinations thereof with the aforementioned post-translationally modified heterologous polypeptide, including heterologous glycoprotein of the heterologous polypeptide, a heterologous lipo-protein of the heterologous polypeptide, a heterologous lipo-glyco-protein of the heterologous polypeptide (e.g. pre-pro-insulin and respiratory syncytial virus pre-fusion glycoprotein). The term “heterologous polypeptide” specifically must include a polypeptide other than: for SEQ ID NOs: 1 and 2, albumin from any species; for SEQ ID NOs: 3 and 4, adenosine triphosphate (ATP) synthase beta subunit (ATPSB) from any species; for SEQ ID NOs: 5 and 6, fibroblast activation protein alpha from any species; for SEQ ID NOs: 7 and 8, histone H4 from any species, including H4 clustered histone 14 and 15; for SEQ ID NOs: 9 and 10, glyceraldehyde-3-phosphate dehydrogenase (GAPDH) from any species; for SEQ ID NOs: 11 and 12, heat shock protein family A (Hsp70) member 8 (HSPA8) from any species; and for SEQ ID NOs: 13 and 14, interleukin-2 from any species. As noted above, the recombinant RNA molecules can comprise a sequence that encodes a heterologous polypeptide. Thereby, the terms “recombination” and “heterologous” are at least provided for by the inclusion of a polypeptide other than the above-noted proteins for the above-noted SEQ ID NOs.

[0121] The term “immunogen” or also known as an “antigen” (Ag) refers to a molecule that provokes an immune response and can be bound to a protein comprising complementary-determining regions such as an antibody or a T-cell receptor. An antibody includes a B-cell receptor (i.e. an antibody complexed with CD79A and CD79B). As noted above, the recombinant RNA molecules can comprise a sequence that encodes an immunogen. In this regard, to provide for such recombination, the terms “immunogen” and “antigen” specifically must include a protein other than: for SEQ ID NOs: 1 and 2, albumin from any species; for SEQ ID NOs: 3 and 4, adenosine triphosphate (ATP) synthase beta subunit (ATPSB) from any species; for SEQ ID NOs: 5 and 6, fibroblast activation protein alpha from any species; for SEQ ID NOs: 7 and 8, histone H4 from any species, including H4 clustered histone 14 and 15; for SEQ ID NOs: 9 and 10, glyceraldehyde-3-phosphate dehydrogenase (GAPDH) from any species; for SEQ ID NOs: 11 and 12, heat shock protein family A (Hsp70) member 8 (HSPA8) from any species; and for SEQ ID NOs: 13 and 14, interleukin-2 from any species.

[0122] The above-noted immune response against the antigen may involve either antibody production against the antigen (i.e. antibody-antigen binding), or the activation of specific immunologically-competent cells to the antigen (i.e. T-cell receptor binding to the antigen), or both. Any macromolecule, including virtually all proteins or peptides, and further including all proteins and peptides comprising post-translational modifications such as the additions of sugars, lipids, and combinations thereof, can serve as an antigen. Antigens can be derived from recombinant or genomic nucleic acids. Any nucleic acid, which comprises a nucleotide sequence or a partial nucleotide sequence encoding a protein that elicits an immune response thereby encodes an “antigen” or “immunogen.” In some embodiments, an antigen or immunogen is encoded by a full-length nucleotide sequence of a gene. In some embodiments, antigens or immunogens are encoded by a partial nucleotide sequence and partial nucleotide sequences of more than one gene. In this regard, in some embodiments, the antigen or immunogen is the full-length native protein or proteins, and in some embodiments, the antigen or immunogen is a truncated portion of the full-length native protein or proteins. In some embodiments, these nucleotide sequences are arranged in various combinations to encode polypeptides that elicit the desired immune response. In this regard, an antigen need not be encoded by a “gene” at all. An antigen can be generated, synthesized, or derived from a biological sample and the amino acid sequence of the protein antigen might be reverse translated or codon optimized to generate a polynucleotide sequence that then encodes the antigen. With regard to the antigen being a full-length or truncated protein and with regard to the antigen activating a T-cell, it is understood that the cells expressing the RNA will express and/or process the antigen in the intracellular environment by truncating the antigen into lengths that can be expressed on by a major histocompatibility receptor so that the T-cell receptor may recognize the MHC-presented antigen.

[0123] Such a biological sample can include, but is not limited to a pathogen, a tissue sample, a tumor sample, a cell, or a fluid with other biological components. The pathogen can include a bacteria or a virus. In some embodiments, the immunogen or antigen comprises a venom, a poison, an allergen, a cancer antigen, a bacterial antigen, a viral antigen, a fungal antigen, a parasite antigen, or a fragment thereof.

[0124] The terms “protein,” “polypeptide,” and “peptide” are used interchangeably herein and refer to any peptide-linked chain of amino acids, regardless of length or post-translational modification (e.g. phosphorylation or addition of sugars, lipids, or combinations thereof).

[0125] The term “post-translational” used herein refers to events that occur after the translation of a nucleotide triplet into an amino acid and the formation of a peptide bond to the proceeding amino acid in the sequence. Such post-translational events may occur after the entire polypeptide was formed or already during the translation process on those parts of the polypeptide that have already been translated. Post-translational events typically alter or modify the chemical or structural properties of the resultant polypeptide. Examples of post-translational events include the addition of sugars, lipids, phospho-groups, cleavage of the peptide chain, or restructuring of folding by, for example, heat shock proteins.

[0126] The term “co-translational” used herein refers to events that occur during the translation process of a nucleotide triplet into an amino acid chain. Those events typically alter or modify the chemical or structural properties of the resultant amino acid chain. Examples of co-translational events include but are not limited to events that may stop the translation process entirely or interrupted the peptide bond formation resulting in two discreet translation products.

[0127] As used herein, the terms “polyprotein” or “artificial polyprotein” refer to an amino acid chain that comprises, or essentially consists of or consists of two amino acid chains that are not naturally connected to each other. The polyprotein may comprise one or more further amino acid chains. Each amino acid chain is preferably a complete protein, i.e. spanning an entire ORF, or a fragment, domain or epitope thereof. The individual parts of a polyprotein may either be permanently or temporarily connected to each other. Parts of a polyprotein that are permanently connected are translated from a single ORF and are not later separated co- or post-translationally. Parts of polyproteins that are connected temporarily may also derive from a single ORF but are divided co-translationally due to separation during the translation process or post-translationally due to cleavage of the peptide chain, e.g. by an endopeptidase. Additionally or alternatively, parts of a polyprotein may also be derived from two different ORF and are connected post-translationally, for instance through covalent bonds.

[0128] An “epitope”, also known as antigenic determinant, is the segment of a macromolecule that is recognized by the immune system, specifically by antibodies or TCRs, (e.g. by B cells, or T cells). Such epitope is that part or segment of a macromolecule capable of binding to an antibody or antigen-binding fragment thereof. In this context, the term “binding” preferably relates to a specific binding. It is preferred that the term “epitope” refers to the segment of protein or polyprotein that is recognized by the immune system. Epitopes usually consist of chemically active surface groupings of molecules such as amino acids or sugar side chains and usually have specific three-dimensional structural characteristics, as well as specific charge characteristics. Conformational and non-conformational epitopes are distinguished in that the binding to the former but not the latter is lost in the presence of denaturing solvents.

[0129] In “polyethylene glycol-2000,” “PEG-2000,” “polyethylene glycol-X,” “PEG-X,” “polyethylene of X Da,” or “PEG of X Da” where “X” is a molecular weight, the “2000” or “X” represents the nearest theoretical molecular weight, which is rounding off to the nearest integer of the number-average of monomers in the measured number-average molecular weight in Daltons of the PEG. For example, the monomer in a PEG-conjugated lipid is ethylene oxide (—CH₂—CH₂—O—), which has a molecular weight of 44.04 Da. Assume that the sample has a number-averaged molecular weight of 1990.608 Da, which has a number-average of 45.2 ethylene oxides (1990.608 Da/(44.04 Da per ethylene oxide)=45.2 number-average ethylene oxides). 45 ethylene oxides would be the nearest integer to a number average of 45.2 ethylene oxides in the number-average molecular weight of 1990.608 Da. 45 monomers would also result in a PEG with a theoretical molecular weight of 1981.8 Da (45 ethylene oxides×44.04 Da per ethylene oxide=1981.8 Da). Thus, the theoretical molecular weight is 1981.8 Da of a PEG lipid having a number-average of 45.2 ethylene oxides in a number-average molecular weight of 1990.608 Da. The molecule having the theoretical molecular weight of the PEG of 1981.8 would be the “PEG-2000” as it is the closest theoretical weight to 2000 Da from a sample having a number average molecular weight of 1990.608 Da.

[0130] “Protect” or “protection” in the context of protecting against infection, diseases, or conditions caused by a pathogen in a subject means to produce either directly (i.e. by encoding an antibody) or indirectly (i.e. by encoding an antigen to which the immune system responds by producing anti-antigen antibodies or anti-antigen TCR-mediated immune responses) or to elicit an immune response that decreases the likelihood of: 1) the host's body being a reservoir for the replication of the pathogen, and/or to such a level of replication that it can pass from that host to another, or 2) the likelihood or severity of a symptom or a reduction in the number of symptoms of infection by said pathogen. In some embodiments, protection reduces the incidence of an infection, disease, or condition caused by pathogen (i.e. whether symptomatic and asymptomatic) possibly leading to the control of the disease associated with said-pathogen (i.e. sudden acute respiratory syndrome coronavirus-2 (SARS-CoV-2) causing the disease known as coronavirus virus disease 2019 (COVID-19) and/or to the control of associated adverse health outcomes caused by the pathogen.

[0131] “Treat” or “treatment” in the context of infection, diseases, or conditions caused by a pathogen means to treat via administration, post-infection any pathogen-causing symptom, effect, or phenotype. Treatment may mean to decrease the severity or frequency of symptoms of the condition or disease in a subject, slow, or eliminate the progression of the condition, totally or partially eliminate the symptoms of the disease or condition in the subject, or reduce or eliminate the number of pathogens in the subject. Treatment of an infection, disease, or condition caused by a pathogen includes ameliorating, stabilizing, reducing, or eliminating the symptoms, effects, or phenotypes caused by the pathogen.

### Recombinant Ribonucleic Acid Molecules Comprising UTRS

[0132] In one aspect, provided is a recombinant ribonucleic acid (RNA) molecule comprising an optional 5′ cap structure (i.e. the 5′ optional cap structure comprising a 5′ cap nucleoside (i.e. a 7-methylguanosine), an optional linker, an optional first 5′ ribonucleoside), a 5′ untranslated region (5′ UTR), a segment that encodes a heterologous polypeptide, a 3′ untranslated region (3′ UTR), and an optional 3′ poly(adenosine monophosphate) (poly(A)) tail; wherein:
[0133] the 5′ UTR is 5′ of the segment that encodes the heterologous polypeptide;
[0134] the 3′ UTR is 3′ of the segment that encodes the heterologous polypeptide;
[0135] the optional 3′ poly(A) is 3′ of the 3′ UTR;
[0136] the 5′ UTR comprises a sequence that:
   [0137] (1) has at least 70% sequence identity to SEQ ID NO: 1, SEQ ID NO: 3, SEQ ID NO: 5, SEQ ID NO: 7, SEQ ID NO: 9, SEQ ID NO: 11, or SEQ ID NO: 13;
   [0138] (2) has at least or no more than 1, 2, 3, 4, 5, or 6 additions, deletions, or substitutions to SEQ ID NO: 1, SEQ ID NO: 3, SEQ ID NO: 5, SEQ ID NO: 7, SEQ ID NO: 9, SEQ ID NO: 11, or SEQ ID NO: 13; or
   [0139] (3) both (1) and (2).

[0140] In another, provided is a recombinant ribonucleic acid (RNA) molecule comprising an optional 5′ cap structure (i.e. the 5′ optional cap structure comprising a 5′ cap nucleoside (i.e. a 7-methylguanosine), an optional linker, an optional first 5′ ribonucleoside), a 5′ untranslated region (5′ UTR), a segment that encodes a heterologous polypeptide, a 3′ untranslated region (3′ UTR), and an optional 3′ poly(adenosine monophosphate) (poly(A)) tail; wherein:
[0141] the 5′ UTR is 5′ of the segment that encodes the heterologous polypeptide;
[0142] the 3′ UTR is 3′ of the segment that encodes the heterologous polypeptide;
[0143] the optional 3′ poly(A) is 3′ of the 3′ UTR; and
[0144] the 3′ UTR comprises a sequence that:
   [0145] (1) has at least 70% sequence identity to SEQ ID NO: 2, SEQ ID NO: 4, SEQ ID NO: 6, SEQ ID NO: 8, SEQ ID NO: 10, SEQ ID NO: 12, or SEQ ID NO: 14;
   [0146] (2) has 0, 1, 2, 3, 4, 5, or 6 additions, deletions, or substitutions to SEQ ID NO: 2, SEQ ID NO: 4, SEQ ID NO: 6, SEQ ID NO: 8, SEQ ID NO: 10, SEQ ID NO: 12, or SEQ ID NO: 14; or
   [0147] (3) has both (1) and (2).

[0148] In one aspect, provided is a recombinant ribonucleic acid (RNA) molecule comprising an optional 5′ 7-methylguanosine, an optional linker, an optional first 5′ ribonucleoside, a 5′ untranslated region (5′ UTR), a segment that encodes a heterologous polypeptide, a 3′ untranslated region (3′ UTR), and an optional 3′ poly(adenosine monophosphate) (poly(A)) tail; wherein:
[0149] the 5′ UTR is 5′ of the segment that encodes the heterologous polypeptide;
[0150] the 3′ UTR is 3′ of the segment that encodes the heterologous polypeptide;
[0151] the optional 3′ poly(A) is 3′ of the 3′ UTR;
[0152] the 5′ UTR comprises a sequence that has at least 70% sequence identity to SEQ ID NO: 1, SEQ ID NO: 3, SEQ ID NO: 5, SEQ ID NO: 7, SEQ ID NO: 9, SEQ ID NO: 11, or SEQ ID NO: 13; and
[0153] the 3′ UTR comprises a sequence that has at least 70% sequence identity to SEQ ID NO: 2, SEQ ID NO: 4, SEQ ID NO: 6, SEQ ID NO: 8, SEQ ID NO: 10, SEQ ID NO: 12, or SEQ ID NO: 14.

### UTR

[0154] In some embodiments, the 5′ UTR comprises, consists of, or is a sequence that has at least or no more than 1, 2, 3, 4, 5, or 6 additions, deletions, or substitutions to SEQ ID NO: 1, SEQ ID NO: 3, SEQ ID NO: 5, SEQ ID NO: 7, SEQ ID NO: 9, SEQ ID NO: 11, or SEQ ID NO: 13. In some embodiments, the 5′ UTR comprises, consists of, or is a sequence that has 0, 1, 2, 3, 4, 5, or 6 additions, deletions, or substitutions to SEQ ID NO: 1, SEQ ID NO: 3, SEQ ID NO: 5, SEQ ID NO: 7, SEQ ID NO: 9, SEQ ID NO: 11, or SEQ ID NO: 13.

[0155] In some embodiments, the 3′ UTR comprises, consists of, or is a sequence that has at least or no more than 1, 2, 3, 4, 5, or 6 additions, deletions, or substitutions to SEQ ID NO: 2, SEQ ID NO: 4, SEQ ID NO: 6, SEQ ID NO: 8, SEQ ID NO: 10, SEQ ID NO: 12, or SEQ ID NO: 14.

[0156] In some embodiments, the 3′ UTR comprises, consists of, or is a sequence that has 0, 1, 2, 3, 4, 5, or 6 additions, deletions, or substitutions to SEQ ID NO: 2, SEQ ID NO: 4, SEQ ID NO: 6, SEQ ID NO: 8, SEQ ID NO: 10, SEQ ID NO: 12, or SEQ ID NO: 14.

[0157] In some embodiments, the 5′ UTR comprises, consists of, or is a sequence that: (1) has at least 70%, 71%, 72%, 73%, 74%, 75%, 76%, 77%, 78%, 79%, 80%, 81%, 82%, 83%, 84%, 85.0%, 85.1%, 85.2%, 85.3%, 85.4%, 85.5%, 85.6%, 85.7%, 85.8%, 85.9%, 86.0%, 86.1%, 86.2%, 86.3%, 86.4%, 86.5%, 86.6%, 86.7%, 86.8%, 86.9%, 87.0%, 87.1%, 87.2%, 87.3%, 87.4%, 87.5%, 87.6%, 87.7%, 87.8%, 87.9%, 88.0%, 88.1%, 88.2%, 88.3%, 88.4%, 88.5%, 88.6%, 88.7%, 88.8%, 88.9%, 89.0%, 89.1%, 89.2%, 89.3%, 89.4%, 89.5%, 89.6%, 89.7%, 89.8%, 89.9%, 90.0%, 90.1%, 90.2%, 90.3%, 90.4%, 90.5%, 90.6%, 90.7%, 90.8%, 90.9%, 91.0%, 91.1%, 91.2%, 91.3%, 91.4%, 91.5%, 91.6%, 91.7%, 91.8%, 91.9%, 92.0%, 92.1%, 92.2%, 92.3%, 92.4%, 92.5%, 92.6%, 92.7%, 92.8%, 92.9%, 93.0%, 93.1%, 93.2%, 93.3%, 93.4%, 93.5%, 93.6%, 93.7%, 93.8%, 93.9%, 94.0%, 94.1%, 94.2%, 94.3%, 94.4%, 94.5%, 94.6%, 94.7%, 94.8%, 94.9%, 95.0%, 95.1%, 95.2%, 95.3%, 95.4%, 95.5%, 95.6%, 95.7%, 95.8%, 95.9%, 96.0%, 96.1%, 96.2%, 96.3%, 96.4%, 96.5%, 96.6%, 96.7%, 96.8%, 96.9%, 97.0%, 97.1%, 97.2%, 97.3%, 97.4%, 97.5%, 97.6%, 97.7%, 97.8%, 97.9%, 98.0%, 98.1%, 98.2%, 98.3%, 98.4%, 98.5%, 98.6%, 98.7%, 98.8%, 98.9%, 99.0%, 99.1%, 99.2%, 99.3%, 99.4%, 99.5%, 99.6%, 99.7%, 99.8%, 99.9%, or 100% identity to SEQ ID NO: 1, SEQ ID NO: 3, SEQ ID NO: 5, SEQ ID NO: 7, SEQ ID NO: 9, SEQ ID NO: 11, or SEQ ID NO: 13; (2) has 0, 1, 2, 3, 4, 5, or 6 additions, deletions, or substitutions to SEQ ID NO: 1, SEQ ID NO: 3, SEQ ID NO: 5, SEQ ID NO: 7, SEQ ID NO: 9, SEQ ID NO: 11, or SEQ ID NO: 13; or (3) has both (1) and (2).

[0158] In some embodiments, the 3′ UTR comprises, consists of, or is a sequence that: (1) has at least 70%, 71%, 72%, 73%, 74%, 75%, 76%, 77%, 78%, 79%, 80%, 81%, 82%, 83%, 84%, 85.0%, 85.1%, 85.2%, 85.3%, 85.4%, 85.5%, 85.6%, 85.7%, 85.8%, 85.9%, 86.0%, 86.1%, 86.2%, 86.3%, 86.4%, 86.5%, 86.6%, 86.7%, 86.8%, 86.9%, 87.0%, 87.1%, 87.2%, 87.3%, 87.4%, 87.5%, 87.6%, 87.7%, 87.8%, 87.9%, 88.0%, 88.1%, 88.2%, 88.3%, 88.4%, 88.5%, 88.6%, 88.7%, 88.8%, 88.9%, 89.0%, 89.1%, 89.2%, 89.3%, 89.4%, 89.5%, 89.6%, 89.7%, 89.8%, 89.9%, 90.0%, 90.1%, 90.2%, 90.3%, 90.4%, 90.5%, 90.6%, 90.7%, 90.8%, 90.9%, 91.0%, 91.1%, 91.2%, 91.3%, 91.4%, 91.5%, 91.6%, 91.7%, 91.8%, 91.9%, 92.0%, 92.1%, 92.2%, 92.3%, 92.4%, 92.5%, 92.6%, 92.7%, 92.8%, 92.9%, 93.0%, 93.1%, 93.2%, 93.3%, 93.4%, 93.5%, 93.6%, 93.7%, 93.8%, 93.9%, 94.0%, 94.1%, 94.2%, 94.3%, 94.4%, 94.5%, 94.6%, 94.7%, 94.8%, 94.9%, 95.0%, 95.1%, 95.2%, 95.3%, 95.4%, 95.5%, 95.6%, 95.7%, 95.8%, 95.9%, 96.0%, 96.1%, 96.2%, 96.3%, 96.4%, 96.5%, 96.6%, 96.7%, 96.8%, 96.9%, 97.0%, 97.1%, 97.2%, 97.3%, 97.4%, 97.5%, 97.6%, 97.7%, 97.8%, 97.9%, 98.0%, 98.1%, 98.2%, 98.3%, 98.4%, 98.5%, 98.6%, 98.7%, 98.8%, 98.9%, 99.0%, 99.1%, 99.2%, 99.3%, 99.4%, 99.5%, 99.6%, 99.7%, 99.8%, 99.9%, or 100% identity to SEQ ID NO: 2, SEQ ID NO: 4, SEQ ID NO: 6, SEQ ID NO: 8, SEQ ID NO: 10, SEQ ID NO: 12, or SEQ ID NO: 14; (2) has 0, 1, 2, 3, 4, 5, or 6 additions, deletions, or substitutions to SEQ ID NO: 2, SEQ ID NO: 4, SEQ ID NO: 6, SEQ ID NO: 8, SEQ ID NO: 10, SEQ ID NO: 12, or SEQ ID NO: 14; or (3) has both (1) and (2).

[0159] In some embodiments, when the 5′ UTR comprises, consists of, or is a sequence that: (1) has at least 70%, 71%, 72%, 73%, 74%, 75%, 76%, 77%, 78%, 79%, 80%, 81%, 82%, 83%, 84%, 85.0%, 85.1%, 85.2%, 85.3%, 85.4%, 85.5%, 85.6%, 85.7%, 85.8%, 85.9%, 86.0%, 86.1%, 86.2%, 86.3%, 86.4%, 86.5%, 86.6%, 86.7%, 86.8%, 86.9%, 87.0%, 87.1%, 87.2%, 87.3%, 87.4%, 87.5%, 87.6%, 87.7%, 87.8%, 87.9%, 88.0%, 88.1%, 88.2%, 88.3%, 88.4%, 88.5%, 88.6%, 88.7%, 88.8%, 88.9%, 89.0%, 89.1%, 89.2%, 89.3%, 89.4%, 89.5%, 89.6%, 89.7%, 89.8%, 89.9%, 90.0%, 90.1%, 90.2%, 90.3%, 90.4%, 90.5%, 90.6%, 90.7%, 90.8%, 90.9%, 91.0%, 91.1%, 91.2%, 91.3%, 91.4%, 91.5%, 91.6%, 91.7%, 91.8%, 91.9%, 92.0%, 92.1%, 92.2%, 92.3%, 92.4%, 92.5%, 92.6%, 92.7%, 92.8%, 92.9%, 93.0%, 93.1%, 93.2%, 93.3%, 93.4%, 93.5%, 93.6%, 93.7%, 93.8%, 93.9%, 94.0%, 94.1%, 94.2%, 94.3%, 94.4%, 94.5%, 94.6%, 94.7%, 94.8%, 94.9%, 95.0%, 95.1%, 95.2%, 95.3%, 95.4%, 95.5%, 95.6%, 95.7%, 95.8%, 95.9%, 96.0%, 96.1%, 96.2%, 96.3%, 96.4%, 96.5%, 96.6%, 96.7%, 96.8%, 96.9%, 97.0%, 97.1%, 97.2%, 97.3%, 97.4%, 97.5%, 97.6%, 97.7%, 97.8%, 97.9%, 98.0%, 98.1%, 98.2%, 98.3%, 98.4%, 98.5%, 98.6%, 98.7%, 98.8%, 98.9%, 99.0%, 99.1%, 99.2%, 99.3%, 99.4%, 99.5%, 99.6%, 99.7%, 99.8%, 99.9%, or 100% identity to SEQ ID NO: 1; (2) has 0, 1, 2, 3, 4, 5, or 6 additions, deletions, or substitutions to SEQ ID NO: 1; or (3) has both (1) and (2), the 3′ UTR comprises, consists of, or is a sequence that: (4) has at least 70%, 71%, 72%, 73%, 74%, 75%, 76%, 77%, 78%, 79%, 80%, 81%, 82%, 83%, 84%, 85.0%, 85.1%, 85.2%, 85.3%, 85.4%, 85.5%, 85.6%, 85.7%, 85.8%, 85.9%, 86.0%, 86.1%, 86.2%, 86.3%, 86.4%, 86.5%, 86.6%, 86.7%, 86.8%, 86.9%, 87.0%, 87.1%, 87.2%, 87.3%, 87.4%, 87.5%, 87.6%, 87.7%, 87.8%, 87.9%, 88.0%, 88.1%, 88.2%, 88.3%, 88.4%, 88.5%, 88.6%, 88.7%, 88.8%, 88.9%, 89.0%, 89.1%, 89.2%, 89.3%, 89.4%, 89.5%, 89.6%, 89.7%, 89.8%, 89.9%, 90.0%, 90.1%, 90.2%, 90.3%, 90.4%, 90.5%, 90.6%, 90.7%, 90.8%, 90.9%, 91.0%, 91.1%, 91.2%, 91.3%, 91.4%, 91.5%, 91.6%, 91.7%, 91.8%, 91.9%, 92.0%, 92.1%, 92.2%, 92.3%, 92.4%, 92.5%, 92.6%, 92.7%, 92.8%, 92.9%, 93.0%, 93.1%, 93.2%, 93.3%, 93.4%, 93.5%, 93.6%, 93.7%, 93.8%, 93.9%, 94.0%, 94.1%, 94.2%, 94.3%, 94.4%, 94.5%, 94.6%, 94.7%, 94.8%, 94.9%, 95.0%, 95.1%, 95.2%, 95.3%, 95.4%, 95.5%, 95.6%, 95.7%, 95.8%, 95.9%, 96.0%, 96.1%, 96.2%, 96.3%, 96.4%, 96.5%, 96.6%, 96.7%, 96.8%, 96.9%, 97.0%, 97.1%, 97.2%, 97.3%, 97.4%, 97.5%, 97.6%, 97.7%, 97.8%, 97.9%, 98.0%, 98.1%, 98.2%, 98.3%, 98.4%, 98.5%, 98.6%, 98.7%, 98.8%, 98.9%, 99.0%, 99.1%, 99.2%, 99.3%, 99.4%, 99.5%, 99.6%, 99.7%, 99.8%, 99.9%, or 100% identity to SEQ ID NO: 2; (5) has 0, 1, 2, 3, 4, 5, or 6 additions, deletions, or substitutions to SEQ ID NO: 2; or (6) has both (4) and (5.

[0160] In some embodiments, when the 5′ UTR comprises, consists of, or is a sequence that: (1) has at least 70%, 71%, 72%, 73%, 74%, 75%, 76%, 77%, 78%, 79%, 80%, 81%, 82%, 83%, 84%, 85.0%, 85.1%, 85.2%, 85.3%, 85.4%, 85.5%, 85.6%, 85.7%, 85.8%, 85.9%, 86.0%, 86.1%, 86.2%, 86.3%, 86.4%, 86.5%, 86.6%, 86.7%, 86.8%, 86.9%, 87.0%, 87.1%, 87.2%, 87.3%, 87.4%, 87.5%, 87.6%, 87.7%, 87.8%, 87.9%, 88.0%, 88.1%, 88.2%, 88.3%, 88.4%, 88.5%, 88.6%, 88.7%, 88.8%, 88.9%, 89.0%, 89.1%, 89.2%, 89.3%, 89.4%, 89.5%, 89.6%, 89.7%, 89.8%, 89.9%, 90.0%, 90.1%, 90.2%, 90.3%, 90.4%, 90.5%, 90.6%, 90.7%, 90.8%, 90.9%, 91.0%, 91.1%, 91.2%, 91.3%, 91.4%, 91.5%, 91.6%, 91.7%, 91.8%, 91.9%, 92.0%, 92.1%, 92.2%, 92.3%, 92.4%, 92.5%, 92.6%, 92.7%, 92.8%, 92.9%, 93.0%, 93.1%, 93.2%, 93.3%, 93.4%, 93.5%, 93.6%, 93.7%, 93.8%, 93.9%, 94.0%, 94.1%, 94.2%, 94.3%, 94.4%, 94.5%, 94.6%, 94.7%, 94.8%, 94.9%, 95.0%, 95.1%, 95.2%, 95.3%, 95.4%, 95.5%, 95.6%, 95.7%, 95.8%, 95.9%, 96.0%, 96.1%, 96.2%, 96.3%, 96.4%, 96.5%, 96.6%, 96.7%, 96.8%, 96.9%, 97.0%, 97.1%, 97.2%, 97.3%, 97.4%, 97.5%, 97.6%, 97.7%, 97.8%, 97.9%, 98.0%, 98.1%, 98.2%, 98.3%, 98.4%, 98.5%, 98.6%, 98.7%, 98.8%, 98.9%, 99.0%, 99.1%, 99.2%, 99.3%, 99.4%, 99.5%, 99.6%, 99.7%, 99.8%, 99.9%, or 100% identity to SEQ ID NO: 3; (2) has 0, 1, 2, 3, 4, 5, or 6 additions, deletions, or substitutions to SEQ ID NO: 3; or (3) has both (1) and (2), the 3′ UTR comprises, consists of, or is a sequence that: (4) has at least 70%, 71%, 72%, 73%, 74%, 75%, 76%, 77%, 78%, 79%, 80%, 81%, 82%, 83%, 84%, 85.0%, 85.1%, 85.2%, 85.3%, 85.4%, 85.5%, 85.6%, 85.7%, 85.8%, 85.9%, 86.0%, 86.1%, 86.2%, 86.3%, 86.4%, 86.5%, 86.6%, 86.7%, 86.8%, 86.9%, 87.0%, 87.1%, 87.2%, 87.3%, 87.4%, 87.5%, 87.6%, 87.7%, 87.8%, 87.9%, 88.0%, 88.1%, 88.2%, 88.3%, 88.4%, 88.5%, 88.6%, 88.7%, 88.8%, 88.9%, 89.0%, 89.1%, 89.2%, 89.3%, 89.4%, 89.5%, 89.6%, 89.7%, 89.8%, 89.9%, 90.0%, 90.1%, 90.2%, 90.3%, 90.4%, 90.5%, 90.6%, 90.7%, 90.8%, 90.9%, 91.0%, 91.1%, 91.2%, 91.3%, 91.4%, 91.5%, 91.6%, 91.7%, 91.8%, 91.9%, 92.0%, 92.1%, 92.2%, 92.3%, 92.4%, 92.5%, 92.6%, 92.7%, 92.8%, 92.9%, 93.0%, 93.1%, 93.2%, 93.3%, 93.4%, 93.5%, 93.6%, 93.7%, 93.8%, 93.9%, 94.0%, 94.1%, 94.2%, 94.3%, 94.4%, 94.5%, 94.6%, 94.7%, 94.8%, 94.9%, 95.0%, 95.1%, 95.2%, 95.3%, 95.4%, 95.5%, 95.6%, 95.7%, 95.8%, 95.9%, 96.0%, 96.1%, 96.2%, 96.3%, 96.4%, 96.5%, 96.6%, 96.7%, 96.8%, 96.9%, 97.0%, 97.1%, 97.2%, 97.3%, 97.4%, 97.5%, 97.6%, 97.7%, 97.8%, 97.9%, 98.0%, 98.1%, 98.2%, 98.3%, 98.4%, 98.5%, 98.6%, 98.7%, 98.8%, 98.9%, 99.0%, 99.1%, 99.2%, 99.3%, 99.4%, 99.5%, 99.6%, 99.7%, 99.8%, 99.9%, or 100% identity to SEQ ID NO: 4; (5) has 0, 1, 2, 3, 4, 5, or 6 additions, deletions, or substitutions to SEQ ID NO: 4; or (6) has both (4) and (5).

[0161] In some embodiments, when the 5′ UTR comprises, consists of, or is a sequence that: (1) has at least 70%, 71%, 72%, 73%, 74%, 75%, 76%, 77%, 78%, 79%, 80%, 81%, 82%, 83%, 84%, 85.0%, 85.1%, 85.2%, 85.3%, 85.4%, 85.5%, 85.6%, 85.7%, 85.8%, 85.9%, 86.0%, 86.1%, 86.2%, 86.3%, 86.4%, 86.5%, 86.6%, 86.7%, 86.8%, 86.9%, 87.0%, 87.1%, 87.2%, 87.3%, 87.4%, 87.5%, 87.6%, 87.7%, 87.8%, 87.9%, 88.0%, 88.1%, 88.2%, 88.3%, 88.4%, 88.5%, 88.6%, 88.7%, 88.8%, 88.9%, 89.0%, 89.1%, 89.2%, 89.3%, 89.4%, 89.5%, 89.6%, 89.7%, 89.8%, 89.9%, 90.0%, 90.1%, 90.2%, 90.3%, 90.4%, 90.5%, 90.6%, 90.7%, 90.8%, 90.9%, 91.0%, 91.1%, 91.2%, 91.3%, 91.4%, 91.5%, 91.6%, 91.7%, 91.8%, 91.9%, 92.0%, 92.1%, 92.2%, 92.3%, 92.4%, 92.5%, 92.6%, 92.7%, 92.8%, 92.9%, 93.0%, 93.1%, 93.2%, 93.3%, 93.4%, 93.5%, 93.6%, 93.7%, 93.8%, 93.9%, 94.0%, 94.1%, 94.2%, 94.3%, 94.4%, 94.5%, 94.6%, 94.7%, 94.8%, 94.9%, 95.0%, 95.1%, 95.2%, 95.3%, 95.4%, 95.5%, 95.6%, 95.7%, 95.8%, 95.9%, 96.0%, 96.1%, 96.2%, 96.3%, 96.4%, 96.5%, 96.6%, 96.7%, 96.8%, 96.9%, 97.0%, 97.1%, 97.2%, 97.3%, 97.4%, 97.5%, 97.6%, 97.7%, 97.8%, 97.9%, 98.0%, 98.1%, 98.2%, 98.3%, 98.4%, 98.5%, 98.6%, 98.7%, 98.8%, 98.9%, 99.0%, 99.1%, 99.2%, 99.3%, 99.4%, 99.5%, 99.6%, 99.7%, 99.8%, 99.9%, or 100% identity to SEQ ID NO: 5; (2) has 0, 1, 2, 3, 4, 5, or 6 additions, deletions, or substitutions to SEQ ID NO: 5; or (3) has both (1) and (2), the 3′ UTR comprises, consists of, or is a sequence that: (4) has at least 70%, 71%, 72%, 73%, 74%, 75%, 76%, 77%, 78%, 79%, 80%, 81%, 82%, 83%, 84%, 85.0%, 85.1%, 85.2%, 85.3%, 85.4%, 85.5%, 85.6%, 85.7%, 85.8%, 85.9%, 86.0%, 86.1%, 86.2%, 86.3%, 86.4%, 86.5%, 86.6%, 86.7%, 86.8%, 86.9%, 87.0%, 87.1%, 87.2%, 87.3%, 87.4%, 87.5%, 87.6%, 87.7%, 87.8%, 87.9%, 88.0%, 88.1%, 88.2%, 88.3%, 88.4%, 88.5%, 88.6%, 88.7%, 88.8%, 88.9%, 89.0%, 89.1%, 89.2%, 89.3%, 89.4%, 89.5%, 89.6%, 89.7%, 89.8%, 89.9%, 90.0%, 90.1%, 90.2%, 90.3%, 90.4%, 90.5%, 90.6%, 90.7%, 90.8%, 90.9%, 91.0%, 91.1%, 91.2%, 91.3%, 91.4%, 91.5%, 91.6%, 91.7%, 91.8%, 91.9%, 92.0%, 92.1%, 92.2%, 92.3%, 92.4%, 92.5%, 92.6%, 92.7%, 92.8%, 92.9%, 93.0%, 93.1%, 93.2%, 93.3%, 93.4%, 93.5%, 93.6%, 93.7%, 93.8%, 93.9%, 94.0%, 94.1%, 94.2%, 94.3%, 94.4%, 94.5%, 94.6%, 94.7%, 94.8%, 94.9%, 95.0%, 95.1%, 95.2%, 95.3%, 95.4%, 95.5%, 95.6%, 95.7%, 95.8%, 95.9%, 96.0%, 96.1%, 96.2%, 96.3%, 96.4%, 96.5%, 96.6%, 96.7%, 96.8%, 96.9%, 97.0%, 97.1%, 97.2%, 97.3%, 97.4%, 97.5%, 97.6%, 97.7%, 97.8%, 97.9%, 98.0%, 98.1%, 98.2%, 98.3%, 98.4%, 98.5%, 98.6%, 98.7%, 98.8%, 98.9%, 99.0%, 99.1%, 99.2%, 99.3%, 99.4%, 99.5%, 99.6%, 99.7%, 99.8%, 99.9%, or 100% identity to SEQ ID NO: 6; (5) has 0, 1, 2, 3, 4, 5, or 6 additions, deletions, or substitutions to SEQ ID NO: 6; or (6) has both (4) and (5).

[0162] In some embodiments, when the 5′ UTR comprises, consists of, or is a sequence that: (1) has at least 70%, 71%, 72%, 73%, 74%, 75%, 76%, 77%, 78%, 79%, 80%, 81%, 82%, 83%, 84%, 85.0%, 85.1%, 85.2%, 85.3%, 85.4%, 85.5%, 85.6%, 85.7%, 85.8%, 85.9%, 86.0%, 86.1%, 86.2%, 86.3%, 86.4%, 86.5%, 86.6%, 86.7%, 86.8%, 86.9%, 87.0%, 87.1%, 87.2%, 87.3%, 87.4%, 87.5%, 87.6%, 87.7%, 87.8%, 87.9%, 88.0%, 88.1%, 88.2%, 88.3%, 88.4%, 88.5%, 88.6%, 88.7%, 88.8%, 88.9%, 89.0%, 89.1%, 89.2%, 89.3%, 89.4%, 89.5%, 89.6%, 89.7%, 89.8%, 89.9%, 90.0%, 90.1%, 90.2%, 90.3%, 90.4%, 90.5%, 90.6%, 90.7%, 90.8%, 90.9%, 91.0%, 91.1%, 91.2%, 91.3%, 91.4%, 91.5%, 91.6%, 91.7%, 91.8%, 91.9%, 92.0%, 92.1%, 92.2%, 92.3%, 92.4%, 92.5%, 92.6%, 92.7%, 92.8%, 92.9%, 93.0%, 93.1%, 93.2%, 93.3%, 93.4%, 93.5%, 93.6%, 93.7%, 93.8%, 93.9%, 94.0%, 94.1%, 94.2%, 94.3%, 94.4%, 94.5%, 94.6%, 94.7%, 94.8%, 94.9%, 95.0%, 95.1%, 95.2%, 95.3%, 95.4%, 95.5%, 95.6%, 95.7%, 95.8%, 95.9%, 96.0%, 96.1%, 96.2%, 96.3%, 96.4%, 96.5%, 96.6%, 96.7%, 96.8%, 96.9%, 97.0%, 97.1%, 97.2%, 97.3%, 97.4%, 97.5%, 97.6%, 97.7%, 97.8%, 97.9%, 98.0%, 98.1%, 98.2%, 98.3%, 98.4%, 98.5%, 98.6%, 98.7%, 98.8%, 98.9%, 99.0%, 99.1%, 99.2%, 99.3%, 99.4%, 99.5%, 99.6%, 99.7%, 99.8%, 99.9%, or 100% identity to SEQ ID NO: 7; (2) has 0, 1, 2, 3, 4, 5, or 6 additions, deletions, or substitutions to SEQ ID NO: 7; or (3) has both (1) and (2), the 3′ UTR comprises, consists of, or is a sequence that: (4) has at least 70%, 71%, 72%, 73%, 74%, 75%, 76%, 77%, 78%, 79%, 80%, 81%, 82%, 83%, 84%, 85.0%, 85.1%, 85.2%, 85.3%, 85.4%, 85.5%, 85.6%, 85.7%, 85.8%, 85.9%, 86.0%, 86.1%, 86.2%, 86.3%, 86.4%, 86.5%, 86.6%, 86.7%, 86.8%, 86.9%, 87.0%, 87.1%, 87.2%, 87.3%, 87.4%, 87.5%, 87.6%, 87.7%, 87.8%, 87.9%, 88.0%, 88.1%, 88.2%, 88.3%, 88.4%, 88.5%, 88.6%, 88.7%, 88.8%, 88.9%, 89.0%, 89.1%, 89.2%, 89.3%, 89.4%, 89.5%, 89.6%, 89.7%, 89.8%, 89.9%, 90.0%, 90.1%, 90.2%, 90.3%, 90.4%, 90.5%, 90.6%, 90.7%, 90.8%, 90.9%, 91.0%, 91.1%, 91.2%, 91.3%, 91.4%, 91.5%, 91.6%, 91.7%, 91.8%, 91.9%, 92.0%, 92.1%, 92.2%, 92.3%, 92.4%, 92.5%, 92.6%, 92.7%, 92.8%, 92.9%, 93.0%, 93.1%, 93.2%, 93.3%, 93.4%, 93.5%, 93.6%, 93.7%, 93.8%, 93.9%, 94.0%, 94.1%, 94.2%, 94.3%, 94.4%, 94.5%, 94.6%, 94.7%, 94.8%, 94.9%, 95.0%, 95.1%, 95.2%, 95.3%, 95.4%, 95.5%, 95.6%, 95.7%, 95.8%, 95.9%, 96.0%, 96.1%, 96.2%, 96.3%, 96.4%, 96.5%, 96.6%, 96.7%, 96.8%, 96.9%, 97.0%, 97.1%, 97.2%, 97.3%, 97.4%, 97.5%, 97.6%, 97.7%, 97.8%, 97.9%, 98.0%, 98.1%, 98.2%, 98.3%, 98.4%, 98.5%, 98.6%, 98.7%, 98.8%, 98.9%, 99.0%, 99.1%, 99.2%, 99.3%, 99.4%, 99.5%, 99.6%, 99.7%, 99.8%, 99.9%, or 100% identity to SEQ ID NO: 8; (5) has 0, 1, 2, 3, 4, 5, or 6 additions, deletions, or substitutions to SEQ ID NO: 8; or (6) has both (4) and (5).

[0163] In some embodiments, when the 5′ UTR comprises, consists of, or is a sequence that: (1) has at least 70%, 71%, 72%, 73%, 74%, 75%, 76%, 77%, 78%, 79%, 80%, 81%, 82%, 83%, 84%, 85.0%, 85.1%, 85.2%, 85.3%, 85.4%, 85.5%, 85.6%, 85.7%, 85.8%, 85.9%, 86.0%, 86.1%, 86.2%, 86.3%, 86.4%, 86.5%, 86.6%, 86.7%, 86.8%, 86.9%, 87.0%, 87.1%, 87.2%, 87.3%, 87.4%, 87.5%, 87.6%, 87.7%, 87.8%, 87.9%, 88.0%, 88.1%, 88.2%, 88.3%, 88.4%, 88.5%, 88.6%, 88.7%, 88.8%, 88.9%, 89.0%, 89.1%, 89.2%, 89.3%, 89.4%, 89.5%, 89.6%, 89.7%, 89.8%, 89.9%, 90.0%, 90.1%, 90.2%, 90.3%, 90.4%, 90.5%, 90.6%, 90.7%, 90.8%, 90.9%, 91.0%, 91.1%, 91.2%, 91.3%, 91.4%, 91.5%, 91.6%, 91.7%, 91.8%, 91.9%, 92.0%, 92.1%, 92.2%, 92.3%, 92.4%, 92.5%, 92.6%, 92.7%, 92.8%, 92.9%, 93.0%, 93.1%, 93.2%, 93.3%, 93.4%, 93.5%, 93.6%, 93.7%, 93.8%, 93.9%, 94.0%, 94.1%, 94.2%, 94.3%, 94.4%, 94.5%, 94.6%, 94.7%, 94.8%, 94.9%, 95.0%, 95.1%, 95.2%, 95.3%, 95.4%, 95.5%, 95.6%, 95.7%, 95.8%, 95.9%, 96.0%, 96.1%, 96.2%, 96.3%, 96.4%, 96.5%, 96.6%, 96.7%, 96.8%, 96.9%, 97.0%, 97.1%, 97.2%, 97.3%, 97.4%, 97.5%, 97.6%, 97.7%, 97.8%, 97.9%, 98.0%, 98.1%, 98.2%, 98.3%, 98.4%, 98.5%, 98.6%, 98.7%, 98.8%, 98.9%, 99.0%, 99.1%, 99.2%, 99.3%, 99.4%, 99.5%, 99.6%, 99.7%, 99.8%, 99.9%, or 100% identity to SEQ ID NO: 9; (2) has 0, 1, 2, 3, 4, 5, or 6 additions, deletions, or substitutions to SEQ ID NO: 9; or (3) has both (1) and (2), the 3′ UTR comprises, consists of, or is a sequence that: (4) has at least 70%, 71%, 72%, 73%, 74%, 75%, 76%, 77%, 78%, 79%, 80%, 81%, 82%, 83%, 84%, 85.0%, 85.1%, 85.2%, 85.3%, 85.4%, 85.5%, 85.6%, 85.7%, 85.8%, 85.9%, 86.0%, 86.1%, 86.2%, 86.3%, 86.4%, 86.5%, 86.6%, 86.7%, 86.8%, 86.9%, 87.0%, 87.1%, 87.2%, 87.3%, 87.4%, 87.5%, 87.6%, 87.7%, 87.8%, 87.9%, 88.0%, 88.1%, 88.2%, 88.3%, 88.4%, 88.5%, 88.6%, 88.7%, 88.8%, 88.9%, 89.0%, 89.1%, 89.2%, 89.3%, 89.4%, 89.5%, 89.6%, 89.7%, 89.8%, 89.9%, 90.0%, 90.1%, 90.2%, 90.3%, 90.4%, 90.5%, 90.6%, 90.7%, 90.8%, 90.9%, 91.0%, 91.1%, 91.2%, 91.3%, 91.4%, 91.5%, 91.6%, 91.7%, 91.8%, 91.9%, 92.0%, 92.1%, 92.2%, 92.3%, 92.4%, 92.5%, 92.6%, 92.7%, 92.8%, 92.9%, 93.0%, 93.1%, 93.2%, 93.3%, 93.4%, 93.5%, 93.6%, 93.7%, 93.8%, 93.9%, 94.0%, 94.1%, 94.2%, 94.3%, 94.4%, 94.5%, 94.6%, 94.7%, 94.8%, 94.9%, 95.0%, 95.1%, 95.2%, 95.3%, 95.4%, 95.5%, 95.6%, 95.7%, 95.8%, 95.9%, 96.0%, 96.1%, 96.2%, 96.3%, 96.4%, 96.5%, 96.6%, 96.7%, 96.8%, 96.9%, 97.0%, 97.1%, 97.2%, 97.3%, 97.4%, 97.5%, 97.6%, 97.7%, 97.8%, 97.9%, 98.0%, 98.1%, 98.2%, 98.3%, 98.4%, 98.5%, 98.6%, 98.7%, 98.8%, 98.9%, 99.0%, 99.1%, 99.2%, 99.3%, 99.4%, 99.5%, 99.6%, 99.7%, 99.8%, 99.9%, or 100% identity to SEQ ID NO: 10; (5) has 0, 1, 2, 3, 4, 5, or 6 additions, deletions, or substitutions to SEQ ID NO: 10; or (6) has both (4) and (5).

[0164] In some embodiments, when the 5′ UTR comprises, consists of, or is a sequence that: (1) has at least 70%, 71%, 72%, 73%, 74%, 75%, 76%, 77%, 78%, 79%, 80%, 81%, 82%, 83%, 84%, 85.0%, 85.1%, 85.2%, 85.3%, 85.4%, 85.5%, 85.6%, 85.7%, 85.8%, 85.9%, 86.0%, 86.1%, 86.2%, 86.3%, 86.4%, 86.5%, 86.6%, 86.7%, 86.8%, 86.9%, 87.0%, 87.1%, 87.2%, 87.3%, 87.4%, 87.5%, 87.6%, 87.7%, 87.8%, 87.9%, 88.0%, 88.1%, 88.2%, 88.3%, 88.4%, 88.5%, 88.6%, 88.7%, 88.8%, 88.9%, 89.0%, 89.1%, 89.2%, 89.3%, 89.4%, 89.5%, 89.6%, 89.7%, 89.8%, 89.9%, 90.0%, 90.1%, 90.2%, 90.3%, 90.4%, 90.5%, 90.6%, 90.7%, 90.8%, 90.9%, 91.0%, 91.1%, 91.2%, 91.3%, 91.4%, 91.5%, 91.6%, 91.7%, 91.8%, 91.9%, 92.0%, 92.1%, 92.2%, 92.3%, 92.4%, 92.5%, 92.6%, 92.7%, 92.8%, 92.9%, 93.0%, 93.1%, 93.2%, 93.3%, 93.4%, 93.5%, 93.6%, 93.7%, 93.8%, 93.9%, 94.0%, 94.1%, 94.2%, 94.3%, 94.4%, 94.5%, 94.6%, 94.7%, 94.8%, 94.9%, 95.0%, 95.1%, 95.2%, 95.3%, 95.4%, 95.5%, 95.6%, 95.7%, 95.8%, 95.9%, 96.0%, 96.1%, 96.2%, 96.3%, 96.4%, 96.5%, 96.6%, 96.7%, 96.8%, 96.9%, 97.0%, 97.1%, 97.2%, 97.3%, 97.4%, 97.5%, 97.6%, 97.7%, 97.8%, 97.9%, 98.0%, 98.1%, 98.2%, 98.3%, 98.4%, 98.5%, 98.6%, 98.7%, 98.8%, 98.9%, 99.0%, 99.1%, 99.2%, 99.3%, 99.4%, 99.5%, 99.6%, 99.7%, 99.8%, 99.9%, or 100% identity to SEQ ID NO: 11; (2) has 0, 1, 2, 3, 4, 5, or 6 additions, deletions, or substitutions to SEQ ID NO: 11; or (3) has both (1) and (2), the 3′ UTR comprises, consists of, or is a sequence that: (4) has at least 70%, 71%, 72%, 73%, 74%, 75%, 76%, 77%, 78%, 79%, 80%, 81%, 82%, 83%, 84%, 85.0%, 85.1%, 85.2%, 85.3%, 85.4%, 85.5%, 85.6%, 85.7%, 85.8%, 85.9%, 86.0%, 86.1%, 86.2%, 86.3%, 86.4%, 86.5%, 86.6%, 86.7%, 86.8%, 86.9%, 87.0%, 87.1%, 87.2%, 87.3%, 87.4%, 87.5%, 87.6%, 87.7%, 87.8%, 87.9%, 88.0%, 88.1%, 88.2%, 88.3%, 88.4%, 88.5%, 88.6%, 88.7%, 88.8%, 88.9%, 89.0%, 89.1%, 89.2%, 89.3%, 89.4%, 89.5%, 89.6%, 89.7%, 89.8%, 89.9%, 90.0%, 90.1%, 90.2%, 90.3%, 90.4%, 90.5%, 90.6%, 90.7%, 90.8%, 90.9%, 91.0%, 91.1%, 91.2%, 91.3%, 91.4%, 91.5%, 91.6%, 91.7%, 91.8%, 91.9%, 92.0%, 92.1%, 92.2%, 92.3%, 92.4%, 92.5%, 92.6%, 92.7%, 92.8%, 92.9%, 93.0%, 93.1%, 93.2%, 93.3%, 93.4%, 93.5%, 93.6%, 93.7%, 93.8%, 93.9%, 94.0%, 94.1%, 94.2%, 94.3%, 94.4%, 94.5%, 94.6%, 94.7%, 94.8%, 94.9%, 95.0%, 95.1%, 95.2%, 95.3%, 95.4%, 95.5%, 95.6%, 95.7%, 95.8%, 95.9%, 96.0%, 96.1%, 96.2%, 96.3%, 96.4%, 96.5%, 96.6%, 96.7%, 96.8%, 96.9%, 97.0%, 97.1%, 97.2%, 97.3%, 97.4%, 97.5%, 97.6%, 97.7%, 97.8%, 97.9%, 98.0%, 98.1%, 98.2%, 98.3%, 98.4%, 98.5%, 98.6%, 98.7%, 98.8%, 98.9%, 99.0%, 99.1%, 99.2%, 99.3%, 99.4%, 99.5%, 99.6%, 99.7%, 99.8%, 99.9%, or 100% identity to SEQ ID NO: 12; (5) has 0, 1, 2, 3, 4, 5, or 6 additions, deletions, or substitutions to SEQ ID NO: 12; or (6) has both (4) and (5).

[0165] In some embodiments, when the 5′ UTR comprises, consists of, or is a sequence that: (1) has at least 70%, 71%, 72%, 73%, 74%, 75%, 76%, 77%, 78%, 79%, 80%, 81%, 82%, 83%, 84%, 85.0%, 85.1%, 85.2%, 85.3%, 85.4%, 85.5%, 85.6%, 85.7%, 85.8%, 85.9%, 86.0%, 86.1%, 86.2%, 86.3%, 86.4%, 86.5%, 86.6%, 86.7%, 86.8%, 86.9%, 87.0%, 87.1%, 87.2%, 87.3%, 87.4%, 87.5%, 87.6%, 87.7%, 87.8%, 87.9%, 88.0%, 88.1%, 88.2%, 88.3%, 88.4%, 88.5%, 88.6%, 88.7%, 88.8%, 88.9%, 89.0%, 89.1%, 89.2%, 89.3%, 89.4%, 89.5%, 89.6%, 89.7%, 89.8%, 89.9%, 90.0%, 90.1%, 90.2%, 90.3%, 90.4%, 90.5%, 90.6%, 90.7%, 90.8%, 90.9%, 91.0%, 91.1%, 91.2%, 91.3%, 91.4%, 91.5%, 91.6%, 91.7%, 91.8%, 91.9%, 92.0%, 92.1%, 92.2%, 92.3%, 92.4%, 92.5%, 92.6%, 92.7%, 92.8%, 92.9%, 93.0%, 93.1%, 93.2%, 93.3%, 93.4%, 93.5%, 93.6%, 93.7%, 93.8%, 93.9%, 94.0%, 94.1%, 94.2%, 94.3%, 94.4%, 94.5%, 94.6%, 94.7%, 94.8%, 94.9%, 95.0%, 95.1%, 95.2%, 95.3%, 95.4%, 95.5%, 95.6%, 95.7%, 95.8%, 95.9%, 96.0%, 96.1%, 96.2%, 96.3%, 96.4%, 96.5%, 96.6%, 96.7%, 96.8%, 96.9%, 97.0%, 97.1%, 97.2%, 97.3%, 97.4%, 97.5%, 97.6%, 97.7%, 97.8%, 97.9%, 98.0%, 98.1%, 98.2%, 98.3%, 98.4%, 98.5%, 98.6%, 98.7%, 98.8%, 98.9%, 99.0%, 99.1%, 99.2%, 99.3%, 99.4%, 99.5%, 99.6%, 99.7%, 99.8%, 99.9%, or 100% identity to SEQ ID NO: 13; (2) has 0, 1, 2, 3, 4, 5, or 6 additions, deletions, or substitutions to SEQ ID NO: 13; or (3) has both (1) and (2), the 3′ UTR comprises, consists of, or is a sequence that: (4) has at least 70%, 71%, 72%, 73%, 74%, 75%, 76%, 77%, 78%, 79%, 80%, 81%, 82%, 83%, 84%, 85.0%, 85.1%, 85.2%, 85.3%, 85.4%, 85.5%, 85.6%, 85.7%, 85.8%, 85.9%, 86.0%, 86.1%, 86.2%, 86.3%, 86.4%, 86.5%, 86.6%, 86.7%, 86.8%, 86.9%, 87.0%, 87.1%, 87.2%, 87.3%, 87.4%, 87.5%, 87.6%, 87.7%, 87.8%, 87.9%, 88.0%, 88.1%, 88.2%, 88.3%, 88.4%, 88.5%, 88.6%, 88.7%, 88.8%, 88.9%, 89.0%, 89.1%, 89.2%, 89.3%, 89.4%, 89.5%, 89.6%, 89.7%, 89.8%, 89.9%, 90.0%, 90.1%, 90.2%, 90.3%, 90.4%, 90.5%, 90.6%, 90.7%, 90.8%, 90.9%, 91.0%, 91.1%, 91.2%, 91.3%, 91.4%, 91.5%, 91.6%, 91.7%, 91.8%, 91.9%, 92.0%, 92.1%, 92.2%, 92.3%, 92.4%, 92.5%, 92.6%, 92.7%, 92.8%, 92.9%, 93.0%, 93.1%, 93.2%, 93.3%, 93.4%, 93.5%, 93.6%, 93.7%, 93.8%, 93.9%, 94.0%, 94.1%, 94.2%, 94.3%, 94.4%, 94.5%, 94.6%, 94.7%, 94.8%, 94.9%, 95.0%, 95.1%, 95.2%, 95.3%, 95.4%, 95.5%, 95.6%, 95.7%, 95.8%, 95.9%, 96.0%, 96.1%, 96.2%, 96.3%, 96.4%, 96.5%, 96.6%, 96.7%, 96.8%, 96.9%, 97.0%, 97.1%, 97.2%, 97.3%, 97.4%, 97.5%, 97.6%, 97.7%, 97.8%, 97.9%, 98.0%, 98.1%, 98.2%, 98.3%, 98.4%, 98.5%, 98.6%, 98.7%, 98.8%, 98.9%, 99.0%, 99.1%, 99.2%, 99.3%, 99.4%, 99.5%, 99.6%, 99.7%, 99.8%, 99.9%, or 100% identity to SEQ ID NO: 14; (5) has 0, 1, 2, 3, 4, 5, or 6 additions, deletions, or substitutions to SEQ ID NO: 14; or (6) has both (4) and (5).

[0166] In some embodiments, the 5′ UTR comprises, consists of, or is a sequence that: (1) has at least 70%, 71%, 72%, 73%, 74%, 75%, 76%, 77%, 78%, 79%, 80%, 81%, 82%, 83%, 84%, 85.0%, 85.1%, 85.2%, 85.3%, 85.4%, 85.5%, 85.6%, 85.7%, 85.8%, 85.9%, 86.0%, 86.1%, 86.2%, 86.3%, 86.4%, 86.5%, 86.6%, 86.7%, 86.8%, 86.9%, 87.0%, 87.1%, 87.2%, 87.3%, 87.4%, 87.5%, 87.6%, 87.7%, 87.8%, 87.9%, 88.0%, 88.1%, 88.2%, 88.3%, 88.4%, 88.5%, 88.6%, 88.7%, 88.8%, 88.9%, 89.0%, 89.1%, 89.2%, 89.3%, 89.4%, 89.5%, 89.6%, 89.7%, 89.8%, 89.9%, 90.0%, 90.1%, 90.2%, 90.3%, 90.4%, 90.5%, 90.6%, 90.7%, 90.8%, 90.9%, 91.0%, 91.1%, 91.2%, 91.3%, 91.4%, 91.5%, 91.6%, 91.7%, 91.8%, 91.9%, 92.0%, 92.1%, 92.2%, 92.3%, 92.4%, 92.5%, 92.6%, 92.7%, 92.8%, 92.9%, 93.0%, 93.1%, 93.2%, 93.3%, 93.4%, 93.5%, 93.6%, 93.7%, 93.8%, 93.9%, 94.0%, 94.1%, 94.2%, 94.3%, 94.4%, 94.5%, 94.6%, 94.7%, 94.8%, 94.9%, 95.0%, 95.1%, 95.2%, 95.3%, 95.4%, 95.5%, 95.6%, 95.7%, 95.8%, 95.9%, 96.0%, 96.1%, 96.2%, 96.3%, 96.4%, 96.5%, 96.6%, 96.7%, 96.8%, 96.9%, 97.0%, 97.1%, 97.2%, 97.3%, 97.4%, 97.5%, 97.6%, 97.7%, 97.8%, 97.9%, 98.0%, 98.1%, 98.2%, 98.3%, 98.4%, 98.5%, 98.6%, 98.7%, 98.8%, 98.9%, 99.0%, 99.1%, 99.2%, 99.3%, 99.4%, 99.5%, 99.6%, 99.7%, 99.8%, 99.9%, or 100% identity to SEQ ID NO: 7; (2) has 0, 1, 2, 3, 4, 5, or 6 additions, deletions, or substitutions to SEQ ID NO: 7; or (3) has both (1) and (2); and the 3′ UTR comprises, consists of, or is a sequence that: (4) has at least 70%, 71%, 72%, 73%, 74%, 75%, 76%, 77%, 78%, 79%, 80%, 81%, 82%, 83%, 84%, 85.0%, 85.1%, 85.2%, 85.3%, 85.4%, 85.5%, 85.6%, 85.7%, 85.8%, 85.9%, 86.0%, 86.1%, 86.2%, 86.3%, 86.4%, 86.5%, 86.6%, 86.7%, 86.8%, 86.9%, 87.0%, 87.1%, 87.2%, 87.3%, 87.4%, 87.5%, 87.6%, 87.7%, 87.8%, 87.9%, 88.0%, 88.1%, 88.2%, 88.3%, 88.4%, 88.5%, 88.6%, 88.7%, 88.8%, 88.9%, 89.0%, 89.1%, 89.2%, 89.3%, 89.4%, 89.5%, 89.6%, 89.7%, 89.8%, 89.9%, 90.0%, 90.1%, 90.2%, 90.3%, 90.4%, 90.5%, 90.6%, 90.7%, 90.8%, 90.9%, 91.0%, 91.1%, 91.2%, 91.3%, 91.4%, 91.5%, 91.6%, 91.7%, 91.8%, 91.9%, 92.0%, 92.1%, 92.2%, 92.3%, 92.4%, 92.5%, 92.6%, 92.7%, 92.8%, 92.9%, 93.0%, 93.1%, 93.2%, 93.3%, 93.4%, 93.5%, 93.6%, 93.7%, 93.8%, 93.9%, 94.0%, 94.1%, 94.2%, 94.3%, 94.4%, 94.5%, 94.6%, 94.7%, 94.8%, 94.9%, 95.0%, 95.1%, 95.2%, 95.3%, 95.4%, 95.5%, 95.6%, 95.7%, 95.8%, 95.9%, 96.0%, 96.1%, 96.2%, 96.3%, 96.4%, 96.5%, 96.6%, 96.7%, 96.8%, 96.9%, 97.0%, 97.1%, 97.2%, 97.3%, 97.4%, 97.5%, 97.6%, 97.7%, 97.8%, 97.9%, 98.0%, 98.1%, 98.2%, 98.3%, 98.4%, 98.5%, 98.6%, 98.7%, 98.8%, 98.9%, 99.0%, 99.1%, 99.2%, 99.3%, 99.4%, 99.5%, 99.6%, 99.7%, 99.8%, 99.9%, or 100% identity to SEQ ID NO: 14; (5) has 0, 1, 2, 3, 4, 5, or 6 additions, deletions, or substitutions to SEQ ID NO: 14; or (6) has both (4) and (5).

[0167] In some embodiments, the 5′ UTR comprises, consists of, or is a sequence that: (1) has at least 70%, 71%, 72%, 73%, 74%, 75%, 76%, 77%, 78%, 79%, 80%, 81%, 82%, 83%, 84%, 85.0%, 85.1%, 85.2%, 85.3%, 85.4%, 85.5%, 85.6%, 85.7%, 85.8%, 85.9%, 86.0%, 86.1%, 86.2%, 86.3%, 86.4%, 86.5%, 86.6%, 86.7%, 86.8%, 86.9%, 87.0%, 87.1%, 87.2%, 87.3%, 87.4%, 87.5%, 87.6%, 87.7%, 87.8%, 87.9%, 88.0%, 88.1%, 88.2%, 88.3%, 88.4%, 88.5%, 88.6%, 88.7%, 88.8%, 88.9%, 89.0%, 89.1%, 89.2%, 89.3%, 89.4%, 89.5%, 89.6%, 89.7%, 89.8%, 89.9%, 90.0%, 90.1%, 90.2%, 90.3%, 90.4%, 90.5%, 90.6%, 90.7%, 90.8%, 90.9%, 91.0%, 91.1%, 91.2%, 91.3%, 91.4%, 91.5%, 91.6%, 91.7%, 91.8%, 91.9%, 92.0%, 92.1%, 92.2%, 92.3%, 92.4%, 92.5%, 92.6%, 92.7%, 92.8%, 92.9%, 93.0%, 93.1%, 93.2%, 93.3%, 93.4%, 93.5%, 93.6%, 93.7%, 93.8%, 93.9%, 94.0%, 94.1%, 94.2%, 94.3%, 94.4%, 94.5%, 94.6%, 94.7%, 94.8%, 94.9%, 95.0%, 95.1%, 95.2%, 95.3%, 95.4%, 95.5%, 95.6%, 95.7%, 95.8%, 95.9%, 96.0%, 96.1%, 96.2%, 96.3%, 96.4%, 96.5%, 96.6%, 96.7%, 96.8%, 96.9%, 97.0%, 97.1%, 97.2%, 97.3%, 97.4%, 97.5%, 97.6%, 97.7%, 97.8%, 97.9%, 98.0%, 98.1%, 98.2%, 98.3%, 98.4%, 98.5%, 98.6%, 98.7%, 98.8%, 98.9%, 99.0%, 99.1%, 99.2%, 99.3%, 99.4%, 99.5%, 99.6%, 99.7%, 99.8%, 99.9%, or 100% identity to SEQ ID NO: 13; (2) has 0, 1, 2, 3, 4, 5, or 6 additions, deletions, or substitutions to SEQ ID NO: 13; or (3) has both (1) and (2); and the 3′ UTR comprises, consists of, or is a sequence that: (4) has at least 70%, 71%, 72%, 73%, 74%, 75%, 76%, 77%, 78%, 79%, 80%, 81%, 82%, 83%, 84%, 85.0%, 85.1%, 85.2%, 85.3%, 85.4%, 85.5%, 85.6%, 85.7%, 85.8%, 85.9%, 86.0%, 86.1%, 86.2%, 86.3%, 86.4%, 86.5%, 86.6%, 86.7%, 86.8%, 86.9%, 87.0%, 87.1%, 87.2%, 87.3%, 87.4%, 87.5%, 87.6%, 87.7%, 87.8%, 87.9%, 88.0%, 88.1%, 88.2%, 88.3%, 88.4%, 88.5%, 88.6%, 88.7%, 88.8%, 88.9%, 89.0%, 89.1%, 89.2%, 89.3%, 89.4%, 89.5%, 89.6%, 89.7%, 89.8%, 89.9%, 90.0%, 90.1%, 90.2%, 90.3%, 90.4%, 90.5%, 90.6%, 90.7%, 90.8%, 90.9%, 91.0%, 91.1%, 91.2%, 91.3%, 91.4%, 91.5%, 91.6%, 91.7%, 91.8%, 91.9%, 92.0%, 92.1%, 92.2%, 92.3%, 92.4%, 92.5%, 92.6%, 92.7%, 92.8%, 92.9%, 93.0%, 93.1%, 93.2%, 93.3%, 93.4%, 93.5%, 93.6%, 93.7%, 93.8%, 93.9%, 94.0%, 94.1%, 94.2%, 94.3%, 94.4%, 94.5%, 94.6%, 94.7%, 94.8%, 94.9%, 95.0%, 95.1%, 95.2%, 95.3%, 95.4%, 95.5%, 95.6%, 95.7%, 95.8%, 95.9%, 96.0%, 96.1%, 96.2%, 96.3%, 96.4%, 96.5%, 96.6%, 96.7%, 96.8%, 96.9%, 97.0%, 97.1%, 97.2%, 97.3%, 97.4%, 97.5%, 97.6%, 97.7%, 97.8%, 97.9%, 98.0%, 98.1%, 98.2%, 98.3%, 98.4%, 98.5%, 98.6%, 98.7%, 98.8%, 98.9%, 99.0%, 99.1%, 99.2%, 99.3%, 99.4%, 99.5%, 99.6%, 99.7%, 99.8%, 99.9%, or 100% identity to SEQ ID NO: 8; (5) has 0, 1, 2, 3, 4, 5, or 6 additions, deletions, or substitutions to SEQ ID NO: 8; or (6) has both (4) and (5).

[0168] In some embodiments, when the 3′ UTR comprises, consists of, or is a sequence that: (1) has at least 70%, 71%, 72%, 73%, 74%, 75%, 76%, 77%, 78%, 79%, 80%, 81%, 82%, 83%, 84%, 85.0%, 85.1%, 85.2%, 85.3%, 85.4%, 85.5%, 85.6%, 85.7%, 85.8%, 85.9%, 86.0%, 86.1%, 86.2%, 86.3%, 86.4%, 86.5%, 86.6%, 86.7%, 86.8%, 86.9%, 87.0%, 87.1%, 87.2%, 87.3%, 87.4%, 87.5%, 87.6%, 87.7%, 87.8%, 87.9%, 88.0%, 88.1%, 88.2%, 88.3%, 88.4%, 88.5%, 88.6%, 88.7%, 88.8%, 88.9%, 89.0%, 89.1%, 89.2%, 89.3%, 89.4%, 89.5%, 89.6%, 89.7%, 89.8%, 89.9%, 90.0%, 90.1%, 90.2%, 90.3%, 90.4%, 90.5%, 90.6%, 90.7%, 90.8%, 90.9%, 91.0%, 91.1%, 91.2%, 91.3%, 91.4%, 91.5%, 91.6%, 91.7%, 91.8%, 91.9%, 92.0%, 92.1%, 92.2%, 92.3%, 92.4%, 92.5%, 92.6%, 92.7%, 92.8%, 92.9%, 93.0%, 93.1%, 93.2%, 93.3%, 93.4%, 93.5%, 93.6%, 93.7%, 93.8%, 93.9%, 94.0%, 94.1%, 94.2%, 94.3%, 94.4%, 94.5%, 94.6%, 94.7%, 94.8%, 94.9%, 95.0%, 95.1%, 95.2%, 95.3%, 95.4%, 95.5%, 95.6%, 95.7%, 95.8%, 95.9%, 96.0%, 96.1%, 96.2%, 96.3%, 96.4%, 96.5%, 96.6%, 96.7%, 96.8%, 96.9%, 97.0%, 97.1%, 97.2%, 97.3%, 97.4%, 97.5%, 97.6%, 97.7%, 97.8%, 97.9%, 98.0%, 98.1%, 98.2%, 98.3%, 98.4%, 98.5%, 98.6%, 98.7%, 98.8%, 98.9%, 99.0%, 99.1%, 99.2%, 99.3%, 99.4%, 99.5%, 99.6%, 99.7%, 99.8%, 99.9%, or 100% identity to SEQ ID NO: 2; (2) has 0, 1, 2, 3, 4, 5, or 6 additions, deletions, or substitutions to SEQ ID NO: 2; or (3) has both (1) and (2); the 5′ UTR comprises, consists of, or is a sequence that: (4) has at least 70%, 71%, 72%, 73%, 74%, 75%, 76%, 77%, 78%, 79%, 80%, 81%, 82%, 83%, 84%, 85.0%, 85.1%, 85.2%, 85.3%, 85.4%, 85.5%, 85.6%, 85.7%, 85.8%, 85.9%, 86.0%, 86.1%, 86.2%, 86.3%, 86.4%, 86.5%, 86.6%, 86.7%, 86.8%, 86.9%, 87.0%, 87.1%, 87.2%, 87.3%, 87.4%, 87.5%, 87.6%, 87.7%, 87.8%, 87.9%, 88.0%, 88.1%, 88.2%, 88.3%, 88.4%, 88.5%, 88.6%, 88.7%, 88.8%, 88.9%, 89.0%, 89.1%, 89.2%, 89.3%, 89.4%, 89.5%, 89.6%, 89.7%, 89.8%, 89.9%, 90.0%, 90.1%, 90.2%, 90.3%, 90.4%, 90.5%, 90.6%, 90.7%, 90.8%, 90.9%, 91.0%, 91.1%, 91.2%, 91.3%, 91.4%, 91.5%, 91.6%, 91.7%, 91.8%, 91.9%, 92.0%, 92.1%, 92.2%, 92.3%, 92.4%, 92.5%, 92.6%, 92.7%, 92.8%, 92.9%, 93.0%, 93.1%, 93.2%, 93.3%, 93.4%, 93.5%, 93.6%, 93.7%, 93.8%, 93.9%, 94.0%, 94.1%, 94.2%, 94.3%, 94.4%, 94.5%, 94.6%, 94.7%, 94.8%, 94.9%, 95.0%, 95.1%, 95.2%, 95.3%, 95.4%, 95.5%, 95.6%, 95.7%, 95.8%, 95.9%, 96.0%, 96.1%, 96.2%, 96.3%, 96.4%, 96.5%, 96.6%, 96.7%, 96.8%, 96.9%, 97.0%, 97.1%, 97.2%, 97.3%, 97.4%, 97.5%, 97.6%, 97.7%, 97.8%, 97.9%, 98.0%, 98.1%, 98.2%, 98.3%, 98.4%, 98.5%, 98.6%, 98.7%, 98.8%, 98.9%, 99.0%, 99.1%, 99.2%, 99.3%, 99.4%, 99.5%, 99.6%, 99.7%, 99.8%, 99.9%, or 100% identity to SEQ ID NO: 1; (5) has 0, 1, 2, 3, 4, 5, or 6 additions, deletions, or substitutions to SEQ ID NO: 1; or (6) has both (4) and (5).

[0169] In some embodiments, when the 3′ UTR comprises, consists of, or is a sequence that: (1) has at least 70%, 71%, 72%, 73%, 74%, 75%, 76%, 77%, 78%, 79%, 80%, 81%, 82%, 83%, 84%, 85.0%, 85.1%, 85.2%, 85.3%, 85.4%, 85.5%, 85.6%, 85.7%, 85.8%, 85.9%, 86.0%, 86.1%, 86.2%, 86.3%, 86.4%, 86.5%, 86.6%, 86.7%, 86.8%, 86.9%, 87.0%, 87.1%, 87.2%, 87.3%, 87.4%, 87.5%, 87.6%, 87.7%, 87.8%, 87.9%, 88.0%, 88.1%, 88.2%, 88.3%, 88.4%, 88.5%, 88.6%, 88.7%, 88.8%, 88.9%, 89.0%, 89.1%, 89.2%, 89.3%, 89.4%, 89.5%, 89.6%, 89.7%, 89.8%, 89.9%, 90.0%, 90.1%, 90.2%, 90.3%, 90.4%, 90.5%, 90.6%, 90.7%, 90.8%, 90.9%, 91.0%, 91.1%, 91.2%, 91.3%, 91.4%, 91.5%, 91.6%, 91.7%, 91.8%, 91.9%, 92.0%, 92.1%, 92.2%, 92.3%, 92.4%, 92.5%, 92.6%, 92.7%, 92.8%, 92.9%, 93.0%, 93.1%, 93.2%, 93.3%, 93.4%, 93.5%, 93.6%, 93.7%, 93.8%, 93.9%, 94.0%, 94.1%, 94.2%, 94.3%, 94.4%, 94.5%, 94.6%, 94.7%, 94.8%, 94.9%, 95.0%, 95.1%, 95.2%, 95.3%, 95.4%, 95.5%, 95.6%, 95.7%, 95.8%, 95.9%, 96.0%, 96.1%, 96.2%, 96.3%, 96.4%, 96.5%, 96.6%, 96.7%, 96.8%, 96.9%, 97.0%, 97.1%, 97.2%, 97.3%, 97.4%, 97.5%, 97.6%, 97.7%, 97.8%, 97.9%, 98.0%, 98.1%, 98.2%, 98.3%, 98.4%, 98.5%, 98.6%, 98.7%, 98.8%, 98.9%, 99.0%, 99.1%, 99.2%, 99.3%, 99.4%, 99.5%, 99.6%, 99.7%, 99.8%, 99.9%, or 100% identity to SEQ ID NO: 4; (2) has 0, 1, 2, 3, 4, 5, or 6 additions, deletions, or substitutions to SEQ ID NO: 4; or (3) has both (1) and (2); the 5′ UTR comprises, consists of, or is a sequence that: (4) has at least 70%, 71%, 72%, 73%, 74%, 75%, 76%, 77%, 78%, 79%, 80%, 81%, 82%, 83%, 84%, 85.0%, 85.1%, 85.2%, 85.3%, 85.4%, 85.5%, 85.6%, 85.7%, 85.8%, 85.9%, 86.0%, 86.1%, 86.2%, 86.3%, 86.4%, 86.5%, 86.6%, 86.7%, 86.8%, 86.9%, 87.0%, 87.1%, 87.2%, 87.3%, 87.4%, 87.5%, 87.6%, 87.7%, 87.8%, 87.9%, 88.0%, 88.1%, 88.2%, 88.3%, 88.4%, 88.5%, 88.6%, 88.7%, 88.8%, 88.9%, 89.0%, 89.1%, 89.2%, 89.3%, 89.4%, 89.5%, 89.6%, 89.7%, 89.8%, 89.9%, 90.0%, 90.1%, 90.2%, 90.3%, 90.4%, 90.5%, 90.6%, 90.7%, 90.8%, 90.9%, 91.0%, 91.1%, 91.2%, 91.3%, 91.4%, 91.5%, 91.6%, 91.7%, 91.8%, 91.9%, 92.0%, 92.1%, 92.2%, 92.3%, 92.4%, 92.5%, 92.6%, 92.7%, 92.8%, 92.9%, 93.0%, 93.1%, 93.2%, 93.3%, 93.4%, 93.5%, 93.6%, 93.7%, 93.8%, 93.9%, 94.0%, 94.1%, 94.2%, 94.3%, 94.4%, 94.5%, 94.6%, 94.7%, 94.8%, 94.9%, 95.0%, 95.1%, 95.2%, 95.3%, 95.4%, 95.5%, 95.6%, 95.7%, 95.8%, 95.9%, 96.0%, 96.1%, 96.2%, 96.3%, 96.4%, 96.5%, 96.6%, 96.7%, 96.8%, 96.9%, 97.0%, 97.1%, 97.2%, 97.3%, 97.4%, 97.5%, 97.6%, 97.7%, 97.8%, 97.9%, 98.0%, 98.1%, 98.2%, 98.3%, 98.4%, 98.5%, 98.6%, 98.7%, 98.8%, 98.9%, 99.0%, 99.1%, 99.2%, 99.3%, 99.4%, 99.5%, 99.6%, 99.7%, 99.8%, 99.9%, or 100% identity to SEQ ID NO: 3; (5) has 0, 1, 2, 3, 4, 5, or 6 additions, deletions, or substitutions to SEQ ID NO: 3; or (6) has both (4) and (5).

[0170] In some embodiments, when the 3′ UTR comprises, consists of, or is a sequence that: (1) has at least 70%, 71%, 72%, 73%, 74%, 75%, 76%, 77%, 78%, 79%, 80%, 81%, 82%, 83%, 84%, 85.0%, 85.1%, 85.2%, 85.3%, 85.4%, 85.5%, 85.6%, 85.7%, 85.8%, 85.9%, 86.0%, 86.1%, 86.2%, 86.3%, 86.4%, 86.5%, 86.6%, 86.7%, 86.8%, 86.9%, 87.0%, 87.1%, 87.2%, 87.3%, 87.4%, 87.5%, 87.6%, 87.7%, 87.8%, 87.9%, 88.0%, 88.1%, 88.2%, 88.3%, 88.4%, 88.5%, 88.6%, 88.7%, 88.8%, 88.9%, 89.0%, 89.1%, 89.2%, 89.3%, 89.4%, 89.5%, 89.6%, 89.7%, 89.8%, 89.9%, 90.0%, 90.1%, 90.2%, 90.3%, 90.4%, 90.5%, 90.6%, 90.7%, 90.8%, 90.9%, 91.0%, 91.1%, 91.2%, 91.3%, 91.4%, 91.5%, 91.6%, 91.7%, 91.8%, 91.9%, 92.0%, 92.1%, 92.2%, 92.3%, 92.4%, 92.5%, 92.6%, 92.7%, 92.8%, 92.9%, 93.0%, 93.1%, 93.2%, 93.3%, 93.4%, 93.5%, 93.6%, 93.7%, 93.8%, 93.9%, 94.0%, 94.1%, 94.2%, 94.3%, 94.4%, 94.5%, 94.6%, 94.7%, 94.8%, 94.9%, 95.0%, 95.1%, 95.2%, 95.3%, 95.4%, 95.5%, 95.6%, 95.7%, 95.8%, 95.9%, 96.0%, 96.1%, 96.2%, 96.3%, 96.4%, 96.5%, 96.6%, 96.7%, 96.8%, 96.9%, 97.0%, 97.1%, 97.2%, 97.3%, 97.4%, 97.5%, 97.6%, 97.7%, 97.8%, 97.9%, 98.0%, 98.1%, 98.2%, 98.3%, 98.4%, 98.5%, 98.6%, 98.7%, 98.8%, 98.9%, 99.0%, 99.1%, 99.2%, 99.3%, 99.4%, 99.5%, 99.6%, 99.7%, 99.8%, 99.9%, or 100% identity to SEQ ID NO: 6; (2) has 0, 1, 2, 3, 4, 5, or 6 additions, deletions, or substitutions to SEQ ID NO: 6; or (3) has both (1) and (2); the 5′ UTR comprises, consists of, or is a sequence that: (4) has at least 70%, 71%, 72%, 73%, 74%, 75%, 76%, 77%, 78%, 79%, 80%, 81%, 82%, 83%, 84%, 85.0%, 85.1%, 85.2%, 85.3%, 85.4%, 85.5%, 85.6%, 85.7%, 85.8%, 85.9%, 86.0%, 86.1%, 86.2%, 86.3%, 86.4%, 86.5%, 86.6%, 86.7%, 86.8%, 86.9%, 87.0%, 87.1%, 87.2%, 87.3%, 87.4%, 87.5%, 87.6%, 87.7%, 87.8%, 87.9%, 88.0%, 88.1%, 88.2%, 88.3%, 88.4%, 88.5%, 88.6%, 88.7%, 88.8%, 88.9%, 89.0%, 89.1%, 89.2%, 89.3%, 89.4%, 89.5%, 89.6%, 89.7%, 89.8%, 89.9%, 90.0%, 90.1%, 90.2%, 90.3%, 90.4%, 90.5%, 90.6%, 90.7%, 90.8%, 90.9%, 91.0%, 91.1%, 91.2%, 91.3%, 91.4%, 91.5%, 91.6%, 91.7%, 91.8%, 91.9%, 92.0%, 92.1%, 92.2%, 92.3%, 92.4%, 92.5%, 92.6%, 92.7%, 92.8%, 92.9%, 93.0%, 93.1%, 93.2%, 93.3%, 93.4%, 93.5%, 93.6%, 93.7%, 93.8%, 93.9%, 94.0%, 94.1%, 94.2%, 94.3%, 94.4%, 94.5%, 94.6%, 94.7%, 94.8%, 94.9%, 95.0%, 95.1%, 95.2%, 95.3%, 95.4%, 95.5%, 95.6%, 95.7%, 95.8%, 95.9%, 96.0%, 96.1%, 96.2%, 96.3%, 96.4%, 96.5%, 96.6%, 96.7%, 96.8%, 96.9%, 97.0%, 97.1%, 97.2%, 97.3%, 97.4%, 97.5%, 97.6%, 97.7%, 97.8%, 97.9%, 98.0%, 98.1%, 98.2%, 98.3%, 98.4%, 98.5%, 98.6%, 98.7%, 98.8%, 98.9%, 99.0%, 99.1%, 99.2%, 99.3%, 99.4%, 99.5%, 99.6%, 99.7%, 99.8%, 99.9%, or 100% identity to SEQ ID NO: 5; (5) has 0, 1, 2, 3, 4, 5, or 6 additions, deletions, or substitutions to SEQ ID NO: 5; or (6) has both (4) and (5).

[0171] In some embodiments, when the 3′ UTR comprises, consists of, or is a sequence that: (1) has at least 70%, 71%, 72%, 73%, 74%, 75%, 76%, 77%, 78%, 79%, 80%, 81%, 82%, 83%, 84%, 85.0%, 85.1%, 85.2%, 85.3%, 85.4%, 85.5%, 85.6%, 85.7%, 85.8%, 85.9%, 86.0%, 86.1%, 86.2%, 86.3%, 86.4%, 86.5%, 86.6%, 86.7%, 86.8%, 86.9%, 87.0%, 87.1%, 87.2%, 87.3%, 87.4%, 87.5%, 87.6%, 87.7%, 87.8%, 87.9%, 88.0%, 88.1%, 88.2%, 88.3%, 88.4%, 88.5%, 88.6%, 88.7%, 88.8%, 88.9%, 89.0%, 89.1%, 89.2%, 89.3%, 89.4%, 89.5%, 89.6%, 89.7%, 89.8%, 89.9%, 90.0%, 90.1%, 90.2%, 90.3%, 90.4%, 90.5%, 90.6%, 90.7%, 90.8%, 90.9%, 91.0%, 91.1%, 91.2%, 91.3%, 91.4%, 91.5%, 91.6%, 91.7%, 91.8%, 91.9%, 92.0%, 92.1%, 92.2%, 92.3%, 92.4%, 92.5%, 92.6%, 92.7%, 92.8%, 92.9%, 93.0%, 93.1%, 93.2%, 93.3%, 93.4%, 93.5%, 93.6%, 93.7%, 93.8%, 93.9%, 94.0%, 94.1%, 94.2%, 94.3%, 94.4%, 94.5%, 94.6%, 94.7%, 94.8%, 94.9%, 95.0%, 95.1%, 95.2%, 95.3%, 95.4%, 95.5%, 95.6%, 95.7%, 95.8%, 95.9%, 96.0%, 96.1%, 96.2%, 96.3%, 96.4%, 96.5%, 96.6%, 96.7%, 96.8%, 96.9%, 97.0%, 97.1%, 97.2%, 97.3%, 97.4%, 97.5%, 97.6%, 97.7%, 97.8%, 97.9%, 98.0%, 98.1%, 98.2%, 98.3%, 98.4%, 98.5%, 98.6%, 98.7%, 98.8%, 98.9%, 99.0%, 99.1%, 99.2%, 99.3%, 99.4%, 99.5%, 99.6%, 99.7%, 99.8%, 99.9%, or 100% identity to SEQ ID NO: 8; (2) has 0, 1, 2, 3, 4, 5, or 6 additions, deletions, or substitutions to SEQ ID NO: 8; or (3) has both (1) and (2); the 5′ UTR comprises, consists of, or is a sequence that: (4) has at least 70%, 71%, 72%, 73%, 74%, 75%, 76%, 77%, 78%, 79%, 80%, 81%, 82%, 83%, 84%, 85.0%, 85.1%, 85.2%, 85.3%, 85.4%, 85.5%, 85.6%, 85.7%, 85.8%, 85.9%, 86.0%, 86.1%, 86.2%, 86.3%, 86.4%, 86.5%, 86.6%, 86.7%, 86.8%, 86.9%, 87.0%, 87.1%, 87.2%, 87.3%, 87.4%, 87.5%, 87.6%, 87.7%, 87.8%, 87.9%, 88.0%, 88.1%, 88.2%, 88.3%, 88.4%, 88.5%, 88.6%, 88.7%, 88.8%, 88.9%, 89.0%, 89.1%, 89.2%, 89.3%, 89.4%, 89.5%, 89.6%, 89.7%, 89.8%, 89.9%, 90.0%, 90.1%, 90.2%, 90.3%, 90.4%, 90.5%, 90.6%, 90.7%, 90.8%, 90.9%, 91.0%, 91.1%, 91.2%, 91.3%, 91.4%, 91.5%, 91.6%, 91.7%, 91.8%, 91.9%, 92.0%, 92.1%, 92.2%, 92.3%, 92.4%, 92.5%, 92.6%, 92.7%, 92.8%, 92.9%, 93.0%, 93.1%, 93.2%, 93.3%, 93.4%, 93.5%, 93.6%, 93.7%, 93.8%, 93.9%, 94.0%, 94.1%, 94.2%, 94.3%, 94.4%, 94.5%, 94.6%, 94.7%, 94.8%, 94.9%, 95.0%, 95.1%, 95.2%, 95.3%, 95.4%, 95.5%, 95.6%, 95.7%, 95.8%, 95.9%, 96.0%, 96.1%, 96.2%, 96.3%, 96.4%, 96.5%, 96.6%, 96.7%, 96.8%, 96.9%, 97.0%, 97.1%, 97.2%, 97.3%, 97.4%, 97.5%, 97.6%, 97.7%, 97.8%, 97.9%, 98.0%, 98.1%, 98.2%, 98.3%, 98.4%, 98.5%, 98.6%, 98.7%, 98.8%, 98.9%, 99.0%, 99.1%, 99.2%, 99.3%, 99.4%, 99.5%, 99.6%, 99.7%, 99.8%, 99.9%, or 100% identity to SEQ ID NO: 7; (5) has 0, 1, 2, 3, 4, 5, or 6 additions, deletions, or substitutions to SEQ ID NO: 7; or (6) has both (4) and (5).

[0172] In some embodiments, when the 3′ UTR comprises, consists of, or is a sequence that: (1) has at least 70%, 71%, 72%, 73%, 74%, 75%, 76%, 77%, 78%, 79%, 80%, 81%, 82%, 83%, 84%, 85.0%, 85.1%, 85.2%, 85.3%, 85.4%, 85.5%, 85.6%, 85.7%, 85.8%, 85.9%, 86.0%, 86.1%, 86.2%, 86.3%, 86.4%, 86.5%, 86.6%, 86.7%, 86.8%, 86.9%, 87.0%, 87.1%, 87.2%, 87.3%, 87.4%, 87.5%, 87.6%, 87.7%, 87.8%, 87.9%, 88.0%, 88.1%, 88.2%, 88.3%, 88.4%, 88.5%, 88.6%, 88.7%, 88.8%, 88.9%, 89.0%, 89.1%, 89.2%, 89.3%, 89.4%, 89.5%, 89.6%, 89.7%, 89.8%, 89.9%, 90.0%, 90.1%, 90.2%, 90.3%, 90.4%, 90.5%, 90.6%, 90.7%, 90.8%, 90.9%, 91.0%, 91.1%, 91.2%, 91.3%, 91.4%, 91.5%, 91.6%, 91.7%, 91.8%, 91.9%, 92.0%, 92.1%, 92.2%, 92.3%, 92.4%, 92.5%, 92.6%, 92.7%, 92.8%, 92.9%, 93.0%, 93.1%, 93.2%, 93.3%, 93.4%, 93.5%, 93.6%, 93.7%, 93.8%, 93.9%, 94.0%, 94.1%, 94.2%, 94.3%, 94.4%, 94.5%, 94.6%, 94.7%, 94.8%, 94.9%, 95.0%, 95.1%, 95.2%, 95.3%, 95.4%, 95.5%, 95.6%, 95.7%, 95.8%, 95.9%, 96.0%, 96.1%, 96.2%, 96.3%, 96.4%, 96.5%, 96.6%, 96.7%, 96.8%, 96.9%, 97.0%, 97.1%, 97.2%, 97.3%, 97.4%, 97.5%, 97.6%, 97.7%, 97.8%, 97.9%, 98.0%, 98.1%, 98.2%, 98.3%, 98.4%, 98.5%, 98.6%, 98.7%, 98.8%, 98.9%, 99.0%, 99.1%, 99.2%, 99.3%, 99.4%, 99.5%, 99.6%, 99.7%, 99.8%, 99.9%, or 100% identity to SEQ ID NO: 10; (2) has 0, 1, 2, 3, 4, 5, or 6 additions, deletions, or substitutions to SEQ ID NO: 10; or (3) has both (1) and (2); the 5′ UTR comprises, consists of, or is a sequence that: (4) has at least 70%, 71%, 72%, 73%, 74%, 75%, 76%, 77%, 78%, 79%, 80%, 81%, 82%, 83%, 84%, 85.0%, 85.1%, 85.2%, 85.3%, 85.4%, 85.5%, 85.6%, 85.7%, 85.8%, 85.9%, 86.0%, 86.1%, 86.2%, 86.3%, 86.4%, 86.5%, 86.6%, 86.7%, 86.8%, 86.9%, 87.0%, 87.1%, 87.2%, 87.3%, 87.4%, 87.5%, 87.6%, 87.7%, 87.8%, 87.9%, 88.0%, 88.1%, 88.2%, 88.3%, 88.4%, 88.5%, 88.6%, 88.7%, 88.8%, 88.9%, 89.0%, 89.1%, 89.2%, 89.3%, 89.4%, 89.5%, 89.6%, 89.7%, 89.8%, 89.9%, 90.0%, 90.1%, 90.2%, 90.3%, 90.4%, 90.5%, 90.6%, 90.7%, 90.8%, 90.9%, 91.0%, 91.1%, 91.2%, 91.3%, 91.4%, 91.5%, 91.6%, 91.7%, 91.8%, 91.9%, 92.0%, 92.1%, 92.2%, 92.3%, 92.4%, 92.5%, 92.6%, 92.7%, 92.8%, 92.9%, 93.0%, 93.1%, 93.2%, 93.3%, 93.4%, 93.5%, 93.6%, 93.7%, 93.8%, 93.9%, 94.0%, 94.1%, 94.2%, 94.3%, 94.4%, 94.5%, 94.6%, 94.7%, 94.8%, 94.9%, 95.0%, 95.1%, 95.2%, 95.3%, 95.4%, 95.5%, 95.6%, 95.7%, 95.8%, 95.9%, 96.0%, 96.1%, 96.2%, 96.3%, 96.4%, 96.5%, 96.6%, 96.7%, 96.8%, 96.9%, 97.0%, 97.1%, 97.2%, 97.3%, 97.4%, 97.5%, 97.6%, 97.7%, 97.8%, 97.9%, 98.0%, 98.1%, 98.2%, 98.3%, 98.4%, 98.5%, 98.6%, 98.7%, 98.8%, 98.9%, 99.0%, 99.1%, 99.2%, 99.3%, 99.4%, 99.5%, 99.6%, 99.7%, 99.8%, 99.9%, or 100% identity to SEQ ID NO: 9; (5) has 0, 1, 2, 3, 4, 5, or 6 additions, deletions, or substitutions to SEQ ID NO: 9; or (6) has both (4) and (5).

[0173] In some embodiments, when the 3′ UTR comprises, consists of, or is a sequence that: (1) has at least 70%, 71%, 72%, 73%, 74%, 75%, 76%, 77%, 78%, 79%, 80%, 81%, 82%, 83%, 84%, 85.0%, 85.1%, 85.2%, 85.3%, 85.4%, 85.5%, 85.6%, 85.7%, 85.8%, 85.9%, 86.0%, 86.1%, 86.2%, 86.3%, 86.4%, 86.5%, 86.6%, 86.7%, 86.8%, 86.9%, 87.0%, 87.1%, 87.2%, 87.3%, 87.4%, 87.5%, 87.6%, 87.7%, 87.8%, 87.9%, 88.0%, 88.1%, 88.2%, 88.3%, 88.4%, 88.5%, 88.6%, 88.7%, 88.8%, 88.9%, 89.0%, 89.1%, 89.2%, 89.3%, 89.4%, 89.5%, 89.6%, 89.7%, 89.8%, 89.9%, 90.0%, 90.1%, 90.2%, 90.3%, 90.4%, 90.5%, 90.6%, 90.7%, 90.8%, 90.9%, 91.0%, 91.1%, 91.2%, 91.3%, 91.4%, 91.5%, 91.6%, 91.7%, 91.8%, 91.9%, 92.0%, 92.1%, 92.2%, 92.3%, 92.4%, 92.5%, 92.6%, 92.7%, 92.8%, 92.9%, 93.0%, 93.1%, 93.2%, 93.3%, 93.4%, 93.5%, 93.6%, 93.7%, 93.8%, 93.9%, 94.0%, 94.1%, 94.2%, 94.3%, 94.4%, 94.5%, 94.6%, 94.7%, 94.8%, 94.9%, 95.0%, 95.1%, 95.2%, 95.3%, 95.4%, 95.5%, 95.6%, 95.7%, 95.8%, 95.9%, 96.0%, 96.1%, 96.2%, 96.3%, 96.4%, 96.5%, 96.6%, 96.7%, 96.8%, 96.9%, 97.0%, 97.1%, 97.2%, 97.3%, 97.4%, 97.5%, 97.6%, 97.7%, 97.8%, 97.9%, 98.0%, 98.1%, 98.2%, 98.3%, 98.4%, 98.5%, 98.6%, 98.7%, 98.8%, 98.9%, 99.0%, 99.1%, 99.2%, 99.3%, 99.4%, 99.5%, 99.6%, 99.7%, 99.8%, 99.9%, or 100% identity to SEQ ID NO: 12; (2) has 0, 1, 2, 3, 4, 5, or 6 additions, deletions, or substitutions to SEQ ID NO: 12; or (3) has both (1) and (2); the 5′ UTR comprises, consists of, or is a sequence that: (4) has at least 70%, 71%, 72%, 73%, 74%, 75%, 76%, 77%, 78%, 79%, 80%, 81%, 82%, 83%, 84%, 85.0%, 85.1%, 85.2%, 85.3%, 85.4%, 85.5%, 85.6%, 85.7%, 85.8%, 85.9%, 86.0%, 86.1%, 86.2%, 86.3%, 86.4%, 86.5%, 86.6%, 86.7%, 86.8%, 86.9%, 87.0%, 87.1%, 87.2%, 87.3%, 87.4%, 87.5%, 87.6%, 87.7%, 87.8%, 87.9%, 88.0%, 88.1%, 88.2%, 88.3%, 88.4%, 88.5%, 88.6%, 88.7%, 88.8%, 88.9%, 89.0%, 89.1%, 89.2%, 89.3%, 89.4%, 89.5%, 89.6%, 89.7%, 89.8%, 89.9%, 90.0%, 90.1%, 90.2%, 90.3%, 90.4%, 90.5%, 90.6%, 90.7%, 90.8%, 90.9%, 91.0%, 91.1%, 91.2%, 91.3%, 91.4%, 91.5%, 91.6%, 91.7%, 91.8%, 91.9%, 92.0%, 92.1%, 92.2%, 92.3%, 92.4%, 92.5%, 92.6%, 92.7%, 92.8%, 92.9%, 93.0%, 93.1%, 93.2%, 93.3%, 93.4%, 93.5%, 93.6%, 93.7%, 93.8%, 93.9%, 94.0%, 94.1%, 94.2%, 94.3%, 94.4%, 94.5%, 94.6%, 94.7%, 94.8%, 94.9%, 95.0%, 95.1%, 95.2%, 95.3%, 95.4%, 95.5%, 95.6%, 95.7%, 95.8%, 95.9%, 96.0%, 96.1%, 96.2%, 96.3%, 96.4%, 96.5%, 96.6%, 96.7%, 96.8%, 96.9%, 97.0%, 97.1%, 97.2%, 97.3%, 97.4%, 97.5%, 97.6%, 97.7%, 97.8%, 97.9%, 98.0%, 98.1%, 98.2%, 98.3%, 98.4%, 98.5%, 98.6%, 98.7%, 98.8%, 98.9%, 99.0%, 99.1%, 99.2%, 99.3%, 99.4%, 99.5%, 99.6%, 99.7%, 99.8%, 99.9%, or 100% identity to SEQ ID NO: 11; (5) has 0, 1, 2, 3, 4, 5, or 6 additions, deletions, or substitutions to SEQ ID NO: 11; or (6) has both (4) and (5).

[0174] In some embodiments, when the 3′ UTR comprises, consists of, or is a sequence that: (1) has at least 70%, 71%, 72%, 73%, 74%, 75%, 76%, 77%, 78%, 79%, 80%, 81%, 82%, 83%, 84%, 85.0%, 85.1%, 85.2%, 85.3%, 85.4%, 85.5%, 85.6%, 85.7%, 85.8%, 85.9%, 86.0%, 86.1%, 86.2%, 86.3%, 86.4%, 86.5%, 86.6%, 86.7%, 86.8%, 86.9%, 87.0%, 87.1%, 87.2%, 87.3%, 87.4%, 87.5%, 87.6%, 87.7%, 87.8%, 87.9%, 88.0%, 88.1%, 88.2%, 88.3%, 88.4%, 88.5%, 88.6%, 88.7%, 88.8%, 88.9%, 89.0%, 89.1%, 89.2%, 89.3%, 89.4%, 89.5%, 89.6%, 89.7%, 89.8%, 89.9%, 90.0%, 90.1%, 90.2%, 90.3%, 90.4%, 90.5%, 90.6%, 90.7%, 90.8%, 90.9%, 91.0%, 91.1%, 91.2%, 91.3%, 91.4%, 91.5%, 91.6%, 91.7%, 91.8%, 91.9%, 92.0%, 92.1%, 92.2%, 92.3%, 92.4%, 92.5%, 92.6%, 92.7%, 92.8%, 92.9%, 93.0%, 93.1%, 93.2%, 93.3%, 93.4%, 93.5%, 93.6%, 93.7%, 93.8%, 93.9%, 94.0%, 94.1%, 94.2%, 94.3%, 94.4%, 94.5%, 94.6%, 94.7%, 94.8%, 94.9%, 95.0%, 95.1%, 95.2%, 95.3%, 95.4%, 95.5%, 95.6%, 95.7%, 95.8%, 95.9%, 96.0%, 96.1%, 96.2%, 96.3%, 96.4%, 96.5%, 96.6%, 96.7%, 96.8%, 96.9%, 97.0%, 97.1%, 97.2%, 97.3%, 97.4%, 97.5%, 97.6%, 97.7%, 97.8%, 97.9%, 98.0%, 98.1%, 98.2%, 98.3%, 98.4%, 98.5%, 98.6%, 98.7%, 98.8%, 98.9%, 99.0%, 99.1%, 99.2%, 99.3%, 99.4%, 99.5%, 99.6%, 99.7%, 99.8%, 99.9%, or 100% identity to SEQ ID NO: 14; (2) has 0, 1, 2, 3, 4, 5, or 6 additions, deletions, or substitutions to SEQ ID NO: 14; or (3) has both (1) and (2); the 5′ UTR comprises, consists of, or is a sequence that: (4) has at least 70%, 71%, 72%, 73%, 74%, 75%, 76%, 77%, 78%, 79%, 80%, 81%, 82%, 83%, 84%, 85.0%, 85.1%, 85.2%, 85.3%, 85.4%, 85.5%, 85.6%, 85.7%, 85.8%, 85.9%, 86.0%, 86.1%, 86.2%, 86.3%, 86.4%, 86.5%, 86.6%, 86.7%, 86.8%, 86.9%, 87.0%, 87.1%, 87.2%, 87.3%, 87.4%, 87.5%, 87.6%, 87.7%, 87.8%, 87.9%, 88.0%, 88.1%, 88.2%, 88.3%, 88.4%, 88.5%, 88.6%, 88.7%, 88.8%, 88.9%, 89.0%, 89.1%, 89.2%, 89.3%, 89.4%, 89.5%, 89.6%, 89.7%, 89.8%, 89.9%, 90.0%, 90.1%, 90.2%, 90.3%, 90.4%, 90.5%, 90.6%, 90.7%, 90.8%, 90.9%, 91.0%, 91.1%, 91.2%, 91.3%, 91.4%, 91.5%, 91.6%, 91.7%, 91.8%, 91.9%, 92.0%, 92.1%, 92.2%, 92.3%, 92.4%, 92.5%, 92.6%, 92.7%, 92.8%, 92.9%, 93.0%, 93.1%, 93.2%, 93.3%, 93.4%, 93.5%, 93.6%, 93.7%, 93.8%, 93.9%, 94.0%, 94.1%, 94.2%, 94.3%, 94.4%, 94.5%, 94.6%, 94.7%, 94.8%, 94.9%, 95.0%, 95.1%, 95.2%, 95.3%, 95.4%, 95.5%, 95.6%, 95.7%, 95.8%, 95.9%, 96.0%, 96.1%, 96.2%, 96.3%, 96.4%, 96.5%, 96.6%, 96.7%, 96.8%, 96.9%, 97.0%, 97.1%, 97.2%, 97.3%, 97.4%, 97.5%, 97.6%, 97.7%, 97.8%, 97.9%, 98.0%, 98.1%, 98.2%, 98.3%, 98.4%, 98.5%, 98.6%, 98.7%, 98.8%, 98.9%, 99.0%, 99.1%, 99.2%, 99.3%, 99.4%, 99.5%, 99.6%, 99.7%, 99.8%, 99.9%, or 100% identity to SEQ ID NO: 13; (5) has 0, 1, 2, 3, 4, 5, or 6 additions, deletions, or substitutions to SEQ ID NO: 13; or (6) has both (4) and (5).

Segment or Sequence that Encodes a Heterologous Polypeptide

[0175] In some embodiments, the segment or sequence that encodes a heterologous polypeptide comprises or has one, two, three, four, five, or six stop codons at its 3′ end. In some embodiments, the segment or sequence that encodes a heterologous polypeptide comprises or has a translation initiation codon (i.e. “AUG”) at its 5′ end. In some embodiments, the segment or sequence that encodes a heterologous polypeptide comprises, consists of, consists essentially of, is, or has a segment or sequence that encodes: an immunogen, an antibody, an enzyme, a hormone, or a structural protein. In some embodiments, the heterologous polypeptide includes a heterologous glycoprotein of the heterologous polypeptide, a heterologous lipo-protein of the heterologous polypeptide, a heterologous lipo-glyco-protein of the heterologous polypeptide, and post-translational products of the heterologous polypeptide that was translated from the segment that encodes the heterologous polypeptide. In some embodiments, the heterologous polypeptide comprises an amino acid moiety to which post-translational modification adds the sugars, lipids, lipids and sugars, and post-translational modifications of the heterologous polypeptide. In some embodiments, of the methods disclosed below, the method comprises translation of the heterologous polypeptide from the segment comprising the heterologous polypeptide in the subject and post-translational modification of the amino acid moiety to which the post-translational modification adds a modification comprising a sugar, a lipid, thereby obtaining a cell expressing a post-translationally modified form of the heterologous amino acid.

[0176] In some embodiments, the heterologous polypeptide comprises pre-form or pro-form of biologically active proteins. In some embodiments, the immunogen, the antibody, the enzyme, the hormone, or the structural protein is a pre-form or pro-form of the biologically active immunogen, the biologically active antibody, the biologically active enzyme, the biologically active hormone, or the biologically active structural protein. In some embodiments, the immunogen, the antibody, the enzyme, the hormone, or the structural protein is the biologically active immunogen, the biologically active antibody, the biologically active enzyme, the biologically active hormone, or the biologically active structural protein. For example, respiratory syncytial virus (RSV) immunogens include RSV fusion protein/glycoprotein (RSV—F) and its prefusion form, RSV pre-F.

[0177] In some embodiments, the segment that encodes a heterologous polypeptide comprises a sequence that has at least 70% identity to at least one of SEQ ID NOs: 29-31 and 123-133. In some embodiments, the segment that encodes a heterologous polypeptide (e.g. the antigen-encoding sequence) comprises a sequence that: (1) has at least 70%, 71%, 72%, 73%, 74%, 75%, 76%, 77%, 78%, 79%, 80%, 81%, 82%, 83%, 84%, 85.0%, 85.1%, 85.2%, 85.3%, 85.4%, 85.5%, 85.6%, 85.7%, 85.8%, 85.9%, 86.0%, 86.1%, 86.2%, 86.3%, 86.4%, 86.5%, 86.6%, 86.7%, 86.8%, 86.9%, 87.0%, 87.1%, 87.2%, 87.3%, 87.4%, 87.5%, 87.6%, 87.7%, 87.8%, 87.9%, 88.0%, 88.1%, 88.2%, 88.3%, 88.4%, 88.5%, 88.6%, 88.7%, 88.8%, 88.9%, 89.0%, 89.1%, 89.2%, 89.3%, 89.4%, 89.5%, 89.6%, 89.7%, 89.8%, 89.9%, 90.0%, 90.1%, 90.2%, 90.3%, 90.4%, 90.5%, 90.6%, 90.7%, 90.8%, 90.9%, 91.0%, 91.1%, 91.2%, 91.3%, 91.4%, 91.5%, 91.6%, 91.7%, 91.8%, 91.9%, 92.0%, 92.1%, 92.2%, 92.3%, 92.4%, 92.5%, 92.6%, 92.7%, 92.8%, 92.9%, 93.0%, 93.1%, 93.2%, 93.3%, 93.4%, 93.5%, 93.6%, 93.7%, 93.8%, 93.9%, 94.0%, 94.1%, 94.2%, 94.3%, 94.4%, 94.5%, 94.6%, 94.7%, 94.8%, 94.9%, 95.0%, 95.1%, 95.2%, 95.3%, 95.4%, 95.5%, 95.6%, 95.7%, 95.8%, 95.9%, 96.0%, 96.1%, 96.2%, 96.3%, 96.4%, 96.5%, 96.6%, 96.7%, 96.8%, 96.9%, 97.0%, 97.1%, 97.2%, 97.3%, 97.4%, 97.5%, 97.6%, 97.7%, 97.8%, 97.9%, 98.0%, 98.1%, 98.2%, 98.3%, 98.4%, 98.5%, 98.6%, 98.7%, 98.8%, 98.9%, 99.0%, 99.1%, 99.2%, 99.3%, 99.4%, 99.5%, 99.6%, 99.7%, 99.8%, 99.9%, or 100% identity to at least one of SEQ ID NOs: 29-31 and 123-133; (2) has at least, no more than, or exactly 0, 1, 2, 3, 4, 5, 6, 7, 8, 9, or 10 additions, deletions, or substitutions to at least one of SEQ ID NOs: 29-31 and 123-133; or (3) has both (1) and (2).

[0178] In some embodiments, the recombinant RNA molecule comprises a sequence that: (1) has at least 70% identity to at least one of SEQ ID NOs: 32-40, 45-62, 69-77, 82-90, 134-173, and 178-197; (2) has at least, no more than, or exactly 0, 1, 2, 3, 4, 5, 6, 7, 8, 9, or 10 additions, deletions, or substitutions to at least one of SEQ ID NOs: 32-40, 45-62, 69-77, 82-90, 134-173, and 178-197; or (3) has both (1) and (2). In some embodiments, the recombinant RNA molecule comprises a sequence that: (1) has at least 71%, 72%, 73%, 74%, 75%, 76%, 77%, 78%, 79%, 80%, 81%, 82%, 83%, 84%, 85.0%, 85.1%, 85.2%, 85.3%, 85.4%, 85.5%, 85.6%, 85.7%, 85.8%, 85.9%, 86.0%, 86.1%, 86.2%, 86.3%, 86.4%, 86.5%, 86.6%, 86.7%, 86.8%, 86.9%, 87.0%, 87.1%, 87.2%, 87.3%, 87.4%, 87.5%, 87.6%, 87.7%, 87.8%, 87.9%, 88.0%, 88.1%, 88.2%, 88.3%, 88.4%, 88.5%, 88.6%, 88.7%, 88.8%, 88.9%, 89.0%, 89.1%, 89.2%, 89.3%, 89.4%, 89.5%, 89.6%, 89.7%, 89.8%, 89.9%, 90.0%, 90.1%, 90.2%, 90.3%, 90.4%, 90.5%, 90.6%, 90.7%, 90.8%, 90.9%, 91.0%, 91.1%, 91.2%, 91.3%, 91.4%, 91.5%, 91.6%, 91.7%, 91.8%, 91.9%, 92.0%, 92.1%, 92.2%, 92.3%, 92.4%, 92.5%, 92.6%, 92.7%, 92.8%, 92.9%, 93.0%, 93.1%, 93.2%, 93.3%, 93.4%, 93.5%, 93.6%, 93.7%, 93.8%, 93.9%, 94.0%, 94.1%, 94.2%, 94.3%, 94.4%, 94.5%, 94.6%, 94.7%, 94.8%, 94.9%, 95.0%, 95.1%, 95.2%, 95.3%, 95.4%, 95.5%, 95.6%, 95.7%, 95.8%, 95.9%, 96.0%, 96.1%, 96.2%, 96.3%, 96.4%, 96.5%, 96.6%, 96.7%, 96.8%, 96.9%, 97.0%, 97.1%, 97.2%, 97.3%, 97.4%, 97.5%, 97.6%, 97.7%, 97.8%, 97.9%, 98.0%, 98.1%, 98.2%, 98.3%, 98.4%, 98.5%, 98.6%, 98.7%, 98.8%, 98.9%, 99.0%, 99.1%, 99.2%, 99.3%, 99.4%, 99.5%, 99.6%, 99.7%, 99.8%, 99.9%, or 100% identity to at least one of SEQ ID NOs: 32-40, 45-62, 69-77, 82-90, 134-173, and 178-197; (2) has at least, no more than, or exactly 0, 1, 2, 3, 4, 5, 6, 7, 8, 9, or 10 additions, deletions, or substitutions to at least one of SEQ ID NOs: 32-40, 45-62, 69-77, 82-90, 134-173, and 178-197; or (3) has both (1) and (2).

### Immunogens

[0179] In some embodiments, the immunogen elicits an immune response against at least one of the following bacteria, is an immunogen from at least one of the following bacteria, is an immunogen derived from at least one of the following bacteria (i.e. by being derived, it may not be the exact immunogen polypeptide, but may have modifications which may stabilize the protein for, for example, expression in a cell or presentation by an immune response), or is an immunogen mimotope of a polypeptide from at least one of the following bacteria: Neisseria meningitidis including, but are not limited to, membrane proteins such as adhesins, autotransporters, toxins, iron acquisition proteins, and factor H binding protein; Streptococcus pneumoniae including, but are not limited to, the RrgB pilus subunit, the beta-N-acetyl-hexosaminidase precursor (spr0057), spr0096, general stress protein GSP-781 (spr2021, SP2216), serine/threonine kinase StkP (SP1732), and pneumococcal surface adhesin PsaA; Streptococcus pyogenes; Moraxella catarrhalis; Bordetella pertussis including but are not limited to, pertussis toxin or toxoid (PT), filamentous haemagglutinin (FHA), pertactin, and agglutinogens 2 and 3; Staphylococcus aureus including a hemolysin, esxA, esxB, ferrichrome-binding protein (sta006), and the sta011 lipoprotein; Clostridium tetani including tetanus toxoid immunogen; Cornynebacterium diphtheriae including diphtheria toxoid immunogen; Haemophilus influenzae; Pseudomonas aeruginosa; Streptococcus agalactiae; Chlamydia trachomatis including, but are not limited to, PepA, LcrE, ArtJ, DnaK, CT398, OmpH-like, L7/L12, OmcA, AtoS, CT547, Eno, HtrA, and MurG; Chlamydia pneumoniae; Helicobacter pylori; Escherichia coli, including the following pathological subforms enterotoxigenic E. coli (ETEC), enteroaggregative E. coli (EAggEC), diffusely adhering E. coli (DAEC), enteropathogenic E. coli (EPEC), enterohemorrhagic E. coli (EHEC), and extraintestinal pathogenic E. coli (ExPEC), including therein uropathogenic E. coli (UPEC) and meningitis/sepsis-associated E. coli (MNEC); Bacillus anthracis; Yersinia pestis; Staphylococcus epidermis; Clostridium difficile; Clostridium perfringens; Clostridium botulinums; Legionella pneumophila; Coxiella burnetiid; Brucella, including B. abortus, B. canis, B. melitensis, B. neotomae, B. ovis, B. suis, B. pinnipediae; Francisella, including F. novicida, F. philomiragia, F. tularensis. Neisseria gonorrhoeae, including polypeptides of the outer membrane vesicles; Treponema pallidum; Haemophilus ducreyi; Enterococcus faecalis; Enterococcus faecium; Staphylococcus saprophyticus; Yersinia enterocolitica; Mycobacterium tuberculosis; Rickettsia; Listeria monocytogenes; Vibrio cholerae; Salmonella including Salmonella typhii; Borrelia burgdorferi; Porphyromonas gingivalis; and Klebsiella. In some embodiments, Clostridium difficile immunogens comprise Toxin A and Toxin B (also known as TcdA and TcdB respectively), fragments thereof, detoxifying mutations thereof, and combinations thereof. In some embodiments, the detoxifying mutations of TcdA, TcdB, and fragments thereof comprise include insertions, deletions, and point-mutations. In some embodiments, the detoxifying mutations and fragments of TcdA and TcdB can be those in WO2014/197651, WO2015/123767, and WO2019/64115.

[0180] In some embodiments, the immunogen elicits an immune response against at least one of the following viruses, is an immunogen from at least one of the following viruses, is an immunogen derived from at least one of the following viruses (i.e. by being derived, it may not be the exact immunogen polypeptide, but may have modifications which may stabilize the polypeptide for, for example, expression in a cell or presentation by an immune response), or is an immunogen mimotope of a polypeptide from at least one of the following viruses: Orthomyxovirus including influenza A, B, or C virus, including from influenza A virus subtypes H1, H2, H3, H4, H5, H6, H7, H8, H9, H10, H11, H12, H13, H14, H15, and H16 and including the immunogens of neuraminidase matrix M2 proteins, and hemagglutinin; Paramyxoviridae viruses including, but are not limited to, those derived from Pneumoviruses including respiratory syncytial virus (RSV), Rubulaviruses including mumps virus, Paramyxoviruses including parainfluenza virus, Metapneumoviruses, Morbilliviruses including measles, including the spike-like proteins immunogens thereof, membrane fusion proteins, (i.e. encoded as proteins by the RNA but becoming glycoproteins once translated by the mammalian cell expressing said protein; e.g. RSV F and RSV pre-F) and attachment proteins (i.e. encoded as proteins by the RNA but becoming glycoproteins once translated by the mammalian cell expressing said protein; e.g. RSV G); Poxviridae: Viral immunogens include, but are not limited to, those derived from Orthopoxvirus such as Variola vera, including but not limited to, Variola major and Variola minor; Picornavirus including Rhinoviruses, Heparnavirus, Cardioviruses, Aphthoviruses, and Enteroviruses including EV71 enterovirus, coxsackie A virus, coxsackie B virus, type 1 poliovirus, type 2 poliovirusand type 3 poliovirus; Bunyavirus including Orthobunyavirus such as California encephalitis virus, a Phlebovirus such as Rift Valley Fever virus, and a Nairovirus such as Crimean-Congo hemorrhagic fever virus; Heparnavirus including hepatitis A virus (HAV); Filovirus including Marburg virus and Ebolavirus including Zaire ebolavirus, Tai Forest ebolavirus (nee Ivory Coast ebolavirus), Sudan ebolavirus, Reston ebolavirus, Bundibugyo ebolavirus, and Bombali ebolavirus; Togavirus including, Alphavirus, Arterivirus, and Rubivirus including Rubivirus rubella, Rubivirus ruteetense, and Rubivirus strelense; Flavivirus including Tick-borne encephalitis (TBE) virus, Dengue virus (e.g. types 1, 2, 3 or 4), Yellow Fever virus, Japanese encephalitis virus, Kyasanur Forest Virus, West Nile encephalitis virus, St. Louis encephalitis virus, Russian spring-summer encephalitis virus, Powassan encephalitis virus, and Zikavirus; Pestivirus including Bovine viral diarrhea (BVDV), Classical swine fever (CSFV), and Border disease (BDV); Hepadnavirus including Hepatitis B virus, such as hepatitis B virus surface antigen (HBsAg); other hepatitis viruses, including hepatitis C virus, delta hepatitis virus, hepatitis E virus, and hepatitis G virus; Rhabdovirus including alpharahabdovirinae, Almendravirus, Alphanemrhavirus, Alphapaprhavirus, Alpharicinrhavirus, Arurhavirus, Barhavirus, Caligrhavirus, Curiovirus, Ephemerovirus, Hapavirus, Ledantevirus, Lostrhavirus, Lyssavirus such as rabies virus, Merhavirus, Mousrhavirus, Ohlsrhavirus, Perhabdovirus, Sawgrhavirus, Sigmavirus, Sprivivirus, Sripuvirus, Sunrhavirus, Tibrovirus, Tupavirus, Vesiculovirus, Zarhavirus, Betarhabdovirinae, Alphanucleorhabdovirus, Betanucleorhabdovirus, Cytorhabdovirus, Dichorhavirus, Gammanucleorhabdovirus, Varicosavirus, Gammarhabdovirinae, Novirhabdovirus, Alphacrustrhavirus, Alphadrosrhavirus, Alphahymrhavirus, Betahymrhavirus, Betanemrhavirus, Betapaprhavirus, Betaricinrhavirus; Caliciviridae including Norwalk virus (Norovirus) and Norwalk-like Viruses, such as Hawaii Virus and Snow Mountain Virus; Coronavirus including alpha-, beta-, gamma-, and delta-coronaviruses, including severe acute respiratory syndrome (SARS) coronavirus, SARS-CoV-2, Middle East respiratory syndrome coronavirus, human coronavirus HKU1, coronavirus avian infectious bronchitis (IBV), Mouse hepatitis virus (MHV), and Porcine transmissible gastroenteritis virus (TGEV), including a spike polypeptide immunogen, nucleoprotein immunogen, membrane protein immunogen, and ORF3a protein immunogen; Retrovirus including Oncovirus, Lentivirus, such as human immunodeficiency virus 1 and 2, and Spumavirus; Reovirus including Orthoreovirus, Rotavirus, Orbivirus, and Coltivirus; Parvovirus including Parvovirus B19; Herpesvirus including a human herpesvirus including Herpes Simplex Viruses (HSV), such as HSV types 1 and 2, Varicella-zoster virus (VZV), Epstein-Barr virus (EBV), Cytomegalovirus (CMV), Human Herpesvirus 6 (HHV6), Human Herpesvirus 7 (HHV7), and Human Herpesvirus 8 (HHV8), including such immunogens as gB, gEv(e.g. VZV gE), gH (e.g. CMV gH), gl, gL (e.g. CMV gL), gO; gM, gN; UL128, UL130, and UL131A (e.g. CMV UL128, UL130, and UL131A); Papovaviruses including Polyomaviruses and Papillomaviruses, including 1, 2, 4, 5, 6, 8, 11, 13, 16, 18, 31, 33, 35, 39, 41, 42, 47, 51, 57, 58, 63, and 65 thereof; and Adenovirus including Adenovirus A such as adenoviruses 12, 18, 31, Adenovirus B such as adenoviruses 3, 7, 11, 14, 16, 21, 34, 35, 50, and 55, Adenovirus C such as adenoviruses 1, 2, 5, 6, and 57, Adenovirus D such as adenoviruses 8, 9, 10, 13, 15, 17, 19, 20, 22, 23, 24, 25, 26, 27, 28, 29, 30, 32, 33, 36, 37, 38, 39, 42, 43, 44, 45, 46, 47, 48, 49, 51, 53, 54, 56, 58, 59, 60, 62, 63, 64, 65, 67, 69, 70, 71, 72, 73, 74, and 75, Adenovirus E such as adenovirus 4, Adenovirus F such as adenoviruses 40 and 41, and Adenovirus G such as adenovirus 52.

[0181] In some embodiments, the immunogen elicits an immune response against at least one of the following fungi, is an immunogen from at least one of the following fungi, is an immunogen derived from at least one of the following fungi (i.e. by being derived, it may not be the exact immunogen polypeptide, but may have modifications which may stabilize the polypeptide for, for example, expression in a cell or presentation by an immune response), or is an immunogen mimotope of a polypeptide from at least one of the following fungi: Dermatophytres, Epidermophyton floccusum, Microsporum audouini, Microsporum canis, Microsporum distortum, Microsporum equinum, Microsporum gypsum, Microsporum nanum, Trichophyton concentricum, Trichophyton equinum, Trichophyton gallinae, Trichophyton gypseum, Trichophyton megnini, Trichophyton mentagrophytes, Trichophyton quinckeanum, Trichophyton rubrum, Trichophyton schoenleini, Trichophyton tonsurans, Trichophyton verrucosum, T. verrucosum var. album, var. discoides, var. ochraceum, Trichophyton violaceum, and/or Trichophyton faviforme; Aspergillus fumigatus, Aspergillus flavus, Aspergillus niger, Aspergillus nidulans, Aspergillus terreus, Aspergillus sydowii, Aspergillus flavatus, Aspergillus glaucus, Blastoschizomyces capitatus, Candida albicans, Candida enolase, Candida tropicalis, Candida glabrata, Candida krusei, Candida parapsilosis, Candida stellatoidea, Candida kusei, Candida parakwsei, Candida lusitaniae, Candida pseudotropicalis, Candida guilliermondi, Cladosporium carrionii, Coccidioides immitis, Blastomyces dermatidis, Cryptococcus neoformans, Geotrichum clavatum, Histoplasma capsulatum, Klebsiella pneumoniae, Microsporidia, Encephalitozoon spp., Septata intestinalis; Enterocytozoon bieneusi; Brachiola spp, Microsporidium spp., Nosema spp., Pleistophora spp., Trachipleistophora spp., Vittaforma spp Paracoccidioides brasiliensis, Pneumocystis carinii, Pythiumn insidiosum, Pityrosporum ovale, Sacharomyces cerevisae, Saccharomyces boulardii, Saccharomyces pombe, Scedosporium apiosperum, Sporothrix schenckii, Trichosporon beigelii, Toxoplasma gondii, Penicillium marneffei, Malassezia spp., Fonsecaea spp., Wangiella spp., Sporothrix spp., Basidiobolus spp., Conidiobolus spp., Rhizopus spp, Mucor spp, Absidia spp, Mortierella spp, Cunninghamella spp, Saksenaea spp., Alternaria spp, Curvularia spp, Helminthosporium spp, Fusarium spp, Aspergillus spp, Penicillium spp, Monolinia spp, Rhizoctonia spp, Paecilomyces spp, Pithomyces spp, and Cladosporium spp.

[0182] In some embodiments, the immunogen elicits an immune response against at least one of the following parasites, is an immunogen from at least one of the following parasites, is an immunogen derived from at least one of the following parasites (i.e. by being derived, it may not be the exact immunogen polypeptide, but may have modifications which may stabilize the polypeptide for, for example, expression in a cell or presentation by an immune response), or is an immunogen mimotope of a polypeptide from at least one of the following parasites: Plasmodium, such as P. falciparum, P. vivax, P. malariae, and P. ovale and Caligidae family, particularly those from the Lepeophtheirus and Caligus genera, such as sea lice such as Lepeophtheirus salmonis or Caligus rogercresseyi.

[0183] In some embodiments, the immunogen elicits an immune response against: pollen allergens (tree, herb, weed, and grass pollen allergens); insect or arachnid allergens (inhalant, saliva and venom allergens, e.g. mite allergens, cockroach and midges allergens, hymenopthera venom allergens); animal hair and dandruff allergens (from e.g. dog, cat, horse, rat, mouse, etc.); and food allergens (e.g. a gliadin). Important pollen allergens from trees, grasses and herbs are such originating from the taxonomic orders of Fagales, Oleales, Pinales and platanaceae including, but not limited to, birch (Betula), alder (Alnus), hazel (Corylus), hornbeam (Carpinus) and olive (Olea), cedar (Cryptomeria and Juniperus), plane tree (Platanus), the order of Poales including grasses of the genera Lolium, Phleum, Poa, Cynodon, Dactylis, Holcus, Phalaris, Secale, and Sorghum, the orders of Asterales and Urticales including herbs of the genera Ambrosia, Artemisia, and Parietaria. Other important inhalation allergens are those from house dust mites of the genus Dermatophagoides and Euroglyphus, storage mite e.g.

[0184] Lepidoglyphys, Glycyphagus and Tyrophagus, those from cockroaches, midges and fleas e.g. Blatella, Periplaneta, Chironomus and Ctenocepphalides, and those from mammals such as cat, dog and horse, venom allergens including such originating from stinging or biting insects such as those from the taxonomic order of Hymenoptera including bees (Apidae), wasps (Vespidea), and ants (Formicoidae).

[0185] In some embodiments, the immunogen is a tumor antigen selected from: (a) cancer-testis antigens such as NY-ESO-1, SSX2, SCP1 as well as RAGE, BAGE, GAGE and MAGE family polypeptides, for example, GAGE-1, GAGE-2, MAGE-1, MAGE-2, MAGE-3, MAGE-4, MAGE-5, MAGE-6, and MAGE-12 (which can be used, for example, to address melanoma, lung, head and neck, NSCLC, breast, gastrointestinal, and bladder tumors; (b) mutated antigens, for example, p53 (associated with various solid tumors, e.g., colorectal, lung, head and neck cancer), p21/Ras (associated with, e.g., melanoma, pancreatic cancer and colorectal cancer), CDK4 (associated with, e.g., melanoma), MUM1 (associated with, e.g., melanoma), caspase-8 (associated with, e.g., head and neck cancer), CIA 0205 (associated with, e.g., bladder cancer), HLA-A2-R1701, beta catenin (associated with, e.g., melanoma), TCR (associated with, e.g., T-cell non-Hodgkins lymphoma), BCR-abl (associated with, e.g., chronic myelogenous leukemia), triosephosphate isomerase, KIA 0205, CDC-27, and LDLR-FUT; (c) over-expressed antigens, for example, Galectin 4 (associated with, e.g., colorectal cancer), Galectin 9 (associated with, e.g., Hodgkin's disease), proteinase 3 (associated with, e.g., chronic myelogenous leukemia), WT 1 (associated with, e.g., various leukemias), carbonic anhydrase (associated with, e.g., renal cancer), aldolase A (associated with, e.g., lung cancer), PRAME (associated with, e.g., melanoma), HER-2/neu (associated with, e.g., breast, colon, lung and ovarian cancer), mammaglobin, alpha-fetoprotein (associated with, e.g., hepatoma), KSA (associated with, e.g., colorectal cancer), gastrin (associated with, e.g., pancreatic and gastric cancer), telomerase catalytic protein, MUC-1 (associated with, e.g., breast and ovarian cancer), G-250 (associated with, e.g., renal cell carcinoma), p53 (associated with, e.g., breast, colon cancer), and carcinoembryonic antigen (associated with, e.g., breast cancer, lung cancer, and cancers of the gastrointestinal tract such as colorectal cancer); (d) shared antigens, for example, melanoma-melanocyte differentiation antigens such as MART-1/Melan A, gp100, MC1R, melanocyte-stimulating hormone receptor, tyrosinase, tyrosinase related protein-1/TRP1 and tyrosinase related protein-2/TRP2 (associated with, e.g., melanoma); (e) prostate associated antigens such as PAP, PSA, PSMA, PSH—P1, PSM-P1, PSM-P2, associated with e.g., prostate cancer; (f) immunoglobulin idiotypes (associated with myeloma and B cell lymphomas, for example). In certain embodiments, tumor immunogens include, but are not limited to, p15, Hom/Mel-40, H-Ras, E2A-PRL, H4-RET, IGH-IGK, MYL-RAR, Epstein Barr virus antigens, EBNA, human papillomavirus (HPV) antigens, including E6 and E7, hepatitis B and C virus antigens, human T-cell lymphotropic virus antigens, TSP-180, p185erbB2, p180erbB-3, c-met, mn-23H1, TAG-72-4, CA 19-9, CA 72-4, CAM 17.1, NuMa, K-ras, p16, TAGE, PSCA, CT7, 43-9F, 5T4, 791 Tgp72, beta-HCG, BCA225, BTAA, CA 125, CA 15-3 (CA 27.29BCAA), CA 195, CA 242, CA-50, CAM43, CD68KP1, CO-029, FGF-5, Ga733 (EpCAM), HTgp-175, M344, MA-50, MG7-Ag, MOV18, NB/70K, NY—CO-1, RCAS1, SDCCAG16, TA-90 (Mac-2 binding protein/cyclophilin C-associated protein), TAAL6, TAG72, TLP, TPS, and the like.

[0186] In some embodiments, the segment that encodes an immunogen comprises a sequence that has at least 70% identity to at least one of SEQ ID NOs: 29-31 and 123-133. In some embodiments, the segment that encodes an immunogen comprises a sequence that: (1) has at least 70%, 71%, 72%, 73%, 74%, 75%, 76%, 77%, 78%, 79%, 80%, 81%, 82%, 83%, 84%, 85.0%, 85.1%, 85.2%, 85.3%, 85.4%, 85.5%, 85.6%, 85.7%, 85.8%, 85.9%, 86.0%, 86.1%, 86.2%, 86.3%, 86.4%, 86.5%, 86.6%, 86.7%, 86.8%, 86.9%, 87.0%, 87.1%, 87.2%, 87.3%, 87.4%, 87.5%, 87.6%, 87.7%, 87.8%, 87.9%, 88.0%, 88.1%, 88.2%, 88.3%, 88.4%, 88.5%, 88.6%, 88.7%, 88.8%, 88.9%, 89.0%, 89.1%, 89.2%, 89.3%, 89.4%, 89.5%, 89.6%, 89.7%, 89.8%, 89.9%, 90.0%, 90.1%, 90.2%, 90.3%, 90.4%, 90.5%, 90.6%, 90.7%, 90.8%, 90.9%, 91.0%, 91.1%, 91.2%, 91.3%, 91.4%, 91.5%, 91.6%, 91.7%, 91.8%, 91.9%, 92.0%, 92.1%, 92.2%, 92.3%, 92.4%, 92.5%, 92.6%, 92.7%, 92.8%, 92.9%, 93.0%, 93.1%, 93.2%, 93.3%, 93.4%, 93.5%, 93.6%, 93.7%, 93.8%, 93.9%, 94.0%, 94.1%, 94.2%, 94.3%, 94.4%, 94.5%, 94.6%, 94.7%, 94.8%, 94.9%, 95.0%, 95.1%, 95.2%, 95.3%, 95.4%, 95.5%, 95.6%, 95.7%, 95.8%, 95.9%, 96.0%, 96.1%, 96.2%, 96.3%, 96.4%, 96.5%, 96.6%, 96.7%, 96.8%, 96.9%, 97.0%, 97.1%, 97.2%, 97.3%, 97.4%, 97.5%, 97.6%, 97.7%, 97.8%, 97.9%, 98.0%, 98.1%, 98.2%, 98.3%, 98.4%, 98.5%, 98.6%, 98.7%, 98.8%, 98.9%, 99.0%, 99.1%, 99.2%, 99.3%, 99.4%, 99.5%, 99.6%, 99.7%, 99.8%, 99.9%, or 100% identity to at least one of SEQ ID NOs: 29-31 and 123-133; (2) has at least, no more than, or exactly 0, 1, 2, 3, 4, 5, 6, 7, 8, 9, or 10 additions, deletions, or substitutions to at least one of SEQ ID NOs: 29-31 and 123-133; or (3) has both (1) and (2).

[0187] RECOMBINANT RIBONUCLEIC ACID MOLECULES COMPRISING SEQUENCE THAT ENCODE SARS-COV-2 OMICRON STRAIN-SPECIFIC SPIKE PROTEINS.

[0188] In another aspect, provided is a recombinant RNA molecule comprising a sequence (e.g. the antigen-encoding sequence) that: (1) has at least 70% identity to at least one of SEQ ID NOs: 29, 30, and 123-133; (2) has 0, 1, 2, 3, 4, 5, 6, 7, 8, 9, or 10 additions, deletions, or substitutions to at least one of SEQ ID NOs: 29, 30, and 123-133; or (3) has both (1) and (2); and optionally further comprising an optional 5′ cap structure (the optional 5′ cap structure comprising a 5′ cap nucleoside (i.e. an optional 5′ 7-methylguanosine), an linker, an optional first 5′ ribonucleoside), an optional 5′ UTR, an optional 3′ UTR, and an optional 3′ poly(A) tail.

[0189] In some embodiments, the sequence (e.g. the antigen-encoding sequence) that: (1) has at least 70% identity to at least one of SEQ ID NOs: 29, 30, and 123-133; (2) has 0, 1, 2, 3, 4, 5, 6, 7, 8, 9, or 10 additions, deletions, or substitutions to at least one of SEQ ID NOs: 29, 30, and 123-133; or (3) has both (1) and (2) has: (1) at least 71%, 72%, 73%, 74%, 75%, 76%, 77%, 78%, 79%, 80%, 81%, 82%, 83%, 84%, 85.0%, 85.1%, 85.2%, 85.3%, 85.4%, 85.5%, 85.6%, 85.7%, 85.8%, 85.9%, 86.0%, 86.1%, 86.2%, 86.3%, 86.4%, 86.5%, 86.6%, 86.7%, 86.8%, 86.9%, 87.0%, 87.1%, 87.2%, 87.3%, 87.4%, 87.5%, 87.6%, 87.7%, 87.8%, 87.9%, 88.0%, 88.1%, 88.2%, 88.3%, 88.4%, 88.5%, 88.6%, 88.7%, 88.8%, 88.9%, 89.0%, 89.1%, 89.2%, 89.3%, 89.4%, 89.5%, 89.6%, 89.7%, 89.8%, 89.9%, 90.0%, 90.1%, 90.2%, 90.3%, 90.4%, 90.5%, 90.6%, 90.7%, 90.8%, 90.9%, 91.0%, 91.1%, 91.2%, 91.3%, 91.4%, 91.5%, 91.6%, 91.7%, 91.8%, 91.9%, 92.0%, 92.1%, 92.2%, 92.3%, 92.4%, 92.5%, 92.6%, 92.7%, 92.8%, 92.9%, 93.0%, 93.1%, 93.2%, 93.3%, 93.4%, 93.5%, 93.6%, 93.7%, 93.8%, 93.9%, 94.0%, 94.1%, 94.2%, 94.3%, 94.4%, 94.5%, 94.6%, 94.7%, 94.8%, 94.9%, 95.0%, 95.1%, 95.2%, 95.3%, 95.4%, 95.5%, 95.6%, 95.7%, 95.8%, 95.9%, 96.0%, 96.1%, 96.2%, 96.3%, 96.4%, 96.5%, 96.6%, 96.7%, 96.8%, 96.9%, 97.0%, 97.1%, 97.2%, 97.3%, 97.4%, 97.5%, 97.6%, 97.7%, 97.8%, 97.9%, 98.0%, 98.1%, 98.2%, 98.3%, 98.4%, 98.5%, 98.6%, 98.7%, 98.8%, 98.9%, 99.0%, 99.1%, 99.2%, 99.3%, 99.4%, 99.5%, 99.6%, 99.7%, 99.8%, 99.9%, or 100% identity to at least one of SEQ ID NOs: 29, 30, and 123-133, (2) has 0, 1, 2, 3, 4, 5, 6, 7, 8, 9, or 10 additions, deletions, or substitutions to at least one of SEQ ID NOs: 29, 30, and 123-133; or (3) has both (1) and (2).

[0190] In some embodiments, the recombinant RNA molecule comprises a sequence that: (1) has at least 70% identity to at least one of SEQ ID NOs: 45-62, 134-173, and 178-197; (2) has at least, no more than, or exactly 0, 1, 2, 3, 4, 5, 6, 7, 8, 9, or 10 additions, deletions, or substitutions to at least one of SEQ ID NOs: 45-62, 134-173, and 178-197; or (3) has both (1) and (2). In some embodiments, the recombinant RNA molecule comprises a sequence that has at least 71%, 72%, 73%, 74%, 75%, 76%, 77%, 78%, 79%, 80%, 81%, 82%, 83%, 84%, 85.0%, 85.1%, 85.2%, 85.3%, 85.4%, 85.5%, 85.6%, 85.7%, 85.8%, 85.9%, 86.0%, 86.1%, 86.2%, 86.3%, 86.4%, 86.5%, 86.6%, 86.7%, 86.8%, 86.9%, 87.0%, 87.1%, 87.2%, 87.3%, 87.4%, 87.5%, 87.6%, 87.7%, 87.8%, 87.9%, 88.0%, 88.1%, 88.2%, 88.3%, 88.4%, 88.5%, 88.6%, 88.7%, 88.8%, 88.9%, 89.0%, 89.1%, 89.2%, 89.3%, 89.4%, 89.5%, 89.6%, 89.7%, 89.8%, 89.9%, 90.0%, 90.1%, 90.2%, 90.3%, 90.4%, 90.5%, 90.6%, 90.7%, 90.8%, 90.9%, 91.0%, 91.1%, 91.2%, 91.3%, 91.4%, 91.5%, 91.6%, 91.7%, 91.8%, 91.9%, 92.0%, 92.1%, 92.2%, 92.3%, 92.4%, 92.5%, 92.6%, 92.7%, 92.8%, 92.9%, 93.0%, 93.1%, 93.2%, 93.3%, 93.4%, 93.5%, 93.6%, 93.7%, 93.8%, 93.9%, 94.0%, 94.1%, 94.2%, 94.3%, 94.4%, 94.5%, 94.6%, 94.7%, 94.8%, 94.9%, 95.0%, 95.1%, 95.2%, 95.3%, 95.4%, 95.5%, 95.6%, 95.7%, 95.8%, 95.9%, 96.0%, 96.1%, 96.2%, 96.3%, 96.4%, 96.5%, 96.6%, 96.7%, 96.8%, 96.9%, 97.0%, 97.1%, 97.2%, 97.3%, 97.4%, 97.5%, 97.6%, 97.7%, 97.8%, 97.9%, 98.0%, 98.1%, 98.2%, 98.3%, 98.4%, 98.5%, 98.6%, 98.7%, 98.8%, 98.9%, 99.0%, 99.1%, 99.2%, 99.3%, 99.4%, 99.5%, 99.6%, 99.7%, 99.8%, 99.9%, or 100% identity to at least one of SEQ ID NOs: 45-62; (2) has at least, no more than, or exactly 0, 1, 2, 3, 4, 5, 6, 7, 8, 9, or 10 additions, deletions, or substitutions to at least one of SEQ ID NOs: 45-62, 134-173, and 178-197; or (3) has both (1) and (2).

[0191] In some embodiments, the recombinant RNA molecule further comprises segments that encode other immunogens, such as those noted above. In some embodiments, the recombinant RNA molecule is in a composition that comprises a RNA molecule that encodes an immunogen other than a SARS-CoV-2 omicron strain-specific spike protein or an RNA molecule that does not encode at least one of SEQ ID NOs: 29, 30, and 123-133.

### 3′ Poly(Adenosine Monophosphate) Tail (3′ Poly(A) Tail)

[0192] In some embodiments, the recombinant RNA comprises a 3′ poly(adenosine monophosphate) (poly(A)) tail. In some embodiments, the 3′ poly(A) tail is 3′ from the 3′ UTR. In some embodiments, the 3′ poly(A)) tail at the 3′ end of the recombinant RNA.

[0193] In some embodiments, the poly(A) tail comprises, consists of, consists essentially of, has, or is at least 20, 21, 22, 23, 24, 25, 26, 27, 28, 29, 30, 31, 32, 33, 34, 35, 36, 37, 38, 39, 40, 41, 42, 43, 44, 45, 46, 47, 48, 49, 50, 51, 52, 53, 54, 55, 56, 57, 58, 59, 60, 61, 62, 63, 64, 65, 66, 67, 68, 69, 70, 71, 72, 73, 74, 75, 76, 77, 78, 79, 80, 81, 82, 83, 84, 85, 86, 87, 88, 89, 90, 91, 92, 93, 94, 95, 96, 97, 98, 99, 100, 101, 102, 103, 104, 105, 106, 107, 108, 109, 110, 111, 112, 113, 114, 115, 116, 117, 118, 119, or 120 adenosine monophosphate residues. In some embodiments, the poly(A) tail comprises, consists of, consists essentially of, has, or is at least 20, 21, 22, 23, 24, 25, 26, 27, 28, 29, 30, 31, 32, 33, 34, 35, 36, 37, 38, 39, 40, 41, 42, 43, 44, 45, 46, 47, 48, 49, 50, 51, 52, 53, 54, 55, 56, 57, 58, 59, 60, 61, 62, 63, 64, 65, 66, 67, 68, 69, 70, 71, 72, 73, 74, 75, 76, 77, 78, 79, 80, 81, 82, 83, 84, 85, 86, 87, 88, 89, 90, 91, 92, 93, 94, 95, 96, 97, 98, 99, 100, 101, 102, 103, 104, 105,106, 107,108,109, 110, 111, 112, 113, 114, 115, 116, 117, 118, 119, or 120 consecutive adenosine monophosphate residues.

[0194] In some embodiments, the poly(A) tail comprises, consists of, consists essentially of, has, or is no more than: 30, 31, 32, 33, 34, 35, 36, 37, 38, 39, 40, 41, 42, 43, 44, 45, 46, 47, 48, 49, 50, 51, 52, 53, 54, 55, 56, 57, 58, 59, 60, 61, 62, 63, 64, 65, 66, 67, 68, 69, 70, 71, 72, 73, 74, 75, 76, 77, 78, 79, 80, 81, 82, 83, 84, 85, 86, 87, 88, 89, 90, 91, 92, 93, 94, 95, 96, 97, 98, 99, 100, 101, 102, 103, 104, 105, 106, 107, 108, 109, 110, 111, 112, 113,114,115,116,117,118,119, or 120 adenosine monophosphate residues. In some embodiments, the poly(A) tail comprises, consists of, consists essentially of, has, or is no more than 20, 21, 22, 23, 24, 25, 26, 27, 28, 29, 30, 31, 32, 33, 34, 35, 36, 37, 38, 39, 40, 41, 42, 43, 44, 45, 46, 47, 48, 49, 50, 51, 52, 53, 54, 55, 56, 57, 58, 59, 60, 61, 62, 63, 64, 65, 66, 67, 68, 69, 70, 71, 72, 73, 74, 75, 76, 77, 78, 79, 80, 81, 82, 83, 84, 85, 86, 87, 88, 89, 90, 91, 92, 93, 94, 95, 96, 97, 98, 99, 100, 101, 102, 103, 104,105,106,107,108,109,110,111,112, 113, 114, 115, 116, 117, 118, 119, or 120 consecutive adenosine monophosphate residues.

[0195] Taking the above-noted embodiments into account, it is contemplated and supported that any of the above-noted “adenosine monophosphate residues” of “at least” and any of the above-noted “adenosine monophosphate residues” of “no more than” may be combined to provide an enclosed range (i.e. the 3′ poly(A) tail comprising from 60 to 90 consecutive adenosine monophosphate residues).

[0196] In some embodiments, the poly(A) tail comprises, consists of, consists essentially of, has, or is from 20 to: 21, 22, 23, 24, 25, 26, 27, 28, 29, 30, 31, 32, 33, 34, 35, 36, 37, 38, 39, 40, 41, 42, 43, 44, 45, 46, 47, 48, 49, 50, 51, 52, 53, 54, 55, 56, 57, 58, 59, 60, 61, 62, 63, 64, 65, 66, 67, 68, 69, 70, 71, 72, 73, 74, 75, 76, 77, 78, 79, 80, 81, 82, 83, 84, 85, 86, 87, 88, 89, 90, 91, 92, 93, 94, 95, 96, 97, 98, 99, or 100; from 21 to: 22, 23, 24, 25, 26, 27, 28, 29, 30, 31, 32, 33, 34, 35, 36, 37, 38, 39, 40, 41, 42, 43, 44, 45, 46, 47, 48, 49, 50, 51, 52, 53, 54, 55, 56, 57, 58, 59, 60, 61, 62, 63, 64, 65, 66, 67, 68, 69, 70, 71, 72, 73, 74, 75, 76, 77, 78, 79, 80, 81, 82, 83, 84, 85, 86, 87, 88, 89, 90, 91, 92, 93, 94, 95, 96, 97, 98, 99, or 100; from 22 to: 23, 24, 25, 26, 27, 28, 29, 30, 31, 32, 33, 34, 35, 36, 37, 38, 39, 40, 41, 42, 43, 44, 45, 46, 47, 48, 49, 50, 51, 52, 53, 54, 55, 56, 57, 58, 59, 60, 61, 62, 63, 64, 65, 66, 67, 68, 69, 70, 71, 72, 73, 74, 75, 76, 77, 78, 79, 80, 81, 82, 83, 84, 85, 86, 87, 88, 89, 90, 91, 92, 93, 94, 95, 96, 97, 98, 99, or 100; from 23 to: 24, 25, 26, 27, 28, 29, 30, 31, 32, 33, 34, 35, 36, 37, 38, 39, 40, 41, 42, 43, 44, 45, 46, 47, 48, 49, 50, 51, 52, 53, 54, 55, 56, 57, 58, 59, 60, 61, 62, 63, 64, 65, 66, 67, 68, 69, 70, 71, 72, 73, 74, 75, 76, 77, 78, 79, 80, 81, 82, 83, 84, 85, 86, 87, 88, 89, 90, 91, 92, 93, 94, 95, 96, 97, 98, 99, or 100; from 24 to: 25, 26, 27, 28, 29, 30, 31, 32, 33, 34, 35, 36, 37, 38, 39, 40, 41, 42, 43, 44, 45, 46, 47, 48, 49, 50, 51, 52, 53, 54, 55, 56, 57, 58, 59, 60, 61, 62, 63, 64, 65, 66, 67, 68, 69, 70, 71, 72, 73, 74, 75, 76, 77, 78, 79, 80, 81, 82, 83, 84, 85, 86, 87, 88, 89, 90, 91, 92, 93, 94, 95, 96, 97, 98, 99, or 100; from 25 to: 26, 27, 28, 29, 30, 31, 32, 33, 34, 35, 36, 37, 38, 39, 40, 41, 42, 43, 44, 45, 46, 47, 48, 49, 50, 51, 52, 53, 54, 55, 56, 57, 58, 59, 60, 61, 62, 63, 64, 65, 66, 67, 68, 69, 70, 71, 72, 73, 74, 75, 76, 77, 78, 79, 80, 81, 82, 83, 84, 85, 86, 87, 88, 89, 90, 91, 92, 93, 94, 95, 96, 97, 98, 99, or 100; from 26 to: 27, 28, 29, 30, 31, 32, 33, 34, 35, 36, 37, 38, 39, 40, 41, 42, 43, 44, 45, 46, 47, 48, 49, 50, 51, 52, 53, 54, 55, 56, 57, 58, 59, 60, 61, 62, 63, 64, 65, 66, 67, 68, 69, 70, 71, 72, 73, 74, 75, 76, 77, 78, 79, 80, 81, 82, 83, 84, 85, 86, 87, 88, 89, 90, 91, 92, 93, 94, 95, 96, 97, 98, 99, or 100; from 27 to: 28, 29, 30, 31, 32, 33, 34, 35, 36, 37, 38, 39, 40, 41, 42, 43, 44, 45, 46, 47, 48, 49, 50, 51, 52, 53, 54, 55, 56, 57, 58, 59, 60, 61, 62, 63, 64, 65, 66, 67, 68, 69, 70, 71, 72, 73, 74, 75, 76, 77, 78, 79, 80, 81, 82, 83, 84, 85, 86, 87, 88, 89, 90, 91, 92, 93, 94, 95, 96, 97, 98, 99, or 100; from 28 to: 29, 30, 31, 32, 33, 34, 35, 36, 37, 38, 39, 40, 41, 42, 43, 44, 45, 46, 47, 48, 49, 50, 51, 52, 53, 54, 55, 56, 57, 58, 59, 60, 61, 62, 63, 64, 65, 66, 67, 68, 69, 70, 71, 72, 73, 74, 75, 76, 77, 78, 79, 80, 81, 82, 83, 84, 85, 86, 87, 88, 89, 90, 91, 92, 93, 94, 95, 96, 97, 98, 99, or 100; from 29 to: 30, 31, 32, 33, 34, 35, 36, 37, 38, 39, 40, 41, 42, 43, 44, 45, 46, 47, 48, 49, 50, 51, 52, 53, 54, 55, 56, 57, 58, 59, 60, 61, 62, 63, 64, 65, 66, 67, 68, 69, 70, 71, 72, 73, 74, 75, 76, 77, 78, 79, 80, 81, 82, 83, 84, 85, 86, 87, 88, 89, 90, 91, 92, 93, 94, 95, 96, 97, 98, 99, or 100; from 30 to: 31, 32, 33, 34, 35, 36, 37, 38, 39, 40, 41, 42, 43, 44, 45, 46, 47, 48, 49, 50, 51, 52, 53, 54, 55, 56, 57, 58, 59, 60, 61, 62, 63, 64, 65, 66, 67, 68, 69, 70, 71, 72, 73, 74, 75, 76, 77, 78, 79, 80, 81, 82, 83, 84, 85, 86, 87, 88, 89, 90, 91, 92, 93, 94, 95, 96, 97, 98, 99, or 100; from 31 to: 32, 33, 34, 35, 36, 37, 38, 39, 40, 41, 42, 43, 44, 45, 46, 47, 48, 49, 50, 51, 52, 53, 54, 55, 56, 57, 58, 59, 60, 61, 62, 63, 64, 65, 66, 67, 68, 69, 70, 71, 72, 73, 74, 75, 76, 77, 78, 79, 80, 81, 82, 83, 84, 85, 86, 87, 88, 89, 90, 91, 92, 93, 94, 95, 96, 97, 98, 99, or 100; from 32 to: 33, 34, 35, 36, 37, 38, 39, 40, 41, 42, 43, 44, 45, 46, 47, 48, 49, 50, 51, 52, 53, 54, 55, 56, 57, 58, 59, 60, 61, 62, 63, 64, 65, 66, 67, 68, 69, 70, 71, 72, 73, 74, 75, 76, 77, 78, 79, 80, 81, 82, 83, 84, 85, 86, 87, 88, 89, 90, 91, 92, 93, 94, 95, 96, 97, 98, 99, or 100; from 33 to: 34, 35, 36, 37, 38, 39, 40, 41, 42, 43, 44, 45, 46, 47, 48, 49, 50, 51, 52, 53, 54, 55, 56, 57, 58, 59, 60, 61, 62, 63, 64, 65, 66, 67, 68, 69, 70, 71, 72, 73, 74, 75, 76, 77, 78, 79, 80, 81, 82, 83, 84, 85, 86, 87, 88, 89, 90, 91, 92, 93, 94, 95, 96, 97, 98, 99, or 100; from 34 to: 35, 36, 37, 38, 39, 40, 41, 42, 43, 44, 45, 46, 47, 48, 49, 50, 51, 52, 53, 54, 55, 56, 57, 58, 59, 60, 61, 62, 63, 64, 65, 66, 67, 68, 69, 70, 71, 72, 73, 74, 75, 76, 77, 78, 79, 80, 81, 82, 83, 84, 85, 86, 87, 88, 89, 90, 91, 92, 93, 94, 95, 96, 97, 98, 99, or 100; from 35 to: 36, 37, 38, 39, 40, 41, 42, 43, 44, 45, 46, 47, 48, 49, 50, 51, 52, 53, 54, 55, 56, 57, 58, 59, 60, 61, 62, 63, 64, 65, 66, 67, 68, 69, 70, 71, 72, 73, 74, 75, 76, 77, 78, 79, 80, 81, 82, 83, 84, 85, 86, 87, 88, 89, 90, 91, 92, 93, 94, 95, 96, 97, 98, 99, or 100; from 36 to: 37, 38, 39, 40, 41, 42, 43, 44, 45, 46, 47, 48, 49, 50, 51, 52, 53, 54, 55, 56, 57, 58, 59, 60, 61, 62, 63, 64, 65, 66, 67, 68, 69, 70, 71, 72, 73, 74, 75, 76, 77, 78, 79, 80, 81, 82, 83, 84, 85, 86, 87, 88, 89, 90, 91, 92, 93, 94, 95, 96, 97, 98, 99, or 100; from 37 to: 38, 39, 40, 41, 42, 43, 44, 45, 46, 47, 48, 49, 50, 51, 52, 53, 54, 55, 56, 57, 58, 59, 60, 61, 62, 63, 64, 65, 66, 67, 68, 69, 70, 71, 72, 73, 74, 75, 76, 77, 78, 79, 80, 81, 82, 83, 84, 85, 86, 87, 88, 89, 90, 91, 92, 93, 94, 95, 96, 97, 98, 99, or 100; from 38 to: 39, 40, 41, 42, 43, 44, 45, 46, 47, 48, 49, 50, 51, 52, 53, 54, 55, 56, 57, 58, 59, 60, 61, 62, 63, 64, 65, 66, 67, 68, 69, 70, 71, 72, 73, 74, 75, 76, 77, 78, 79, 80, 81, 82, 83, 84, 85, 86, 87, 88, 89, 90, 91, 92, 93, 94, 95, 96, 97, 98, 99, or 100; from 39 to: 40, 41, 42, 43, 44, 45, 46, 47, 48, 49, 50, 51, 52, 53, 54, 55, 56, 57, 58, 59, 60, 61, 62, 63, 64, 65, 66, 67, 68, 69, 70, 71, 72, 73, 74, 75, 76, 77, 78, 79, 80, 81, 82, 83, 84, 85, 86, 87, 88, 89, 90, 91, 92, 93, 94, 95, 96, 97, 98, 99, or 100; from 40 to: 41, 42, 43, 44, 45, 46, 47, 48, 49, 50, 51, 52, 53, 54, 55, 56, 57, 58, 59, 60, 61, 62, 63, 64, 65, 66, 67, 68, 69, 70, 71, 72, 73, 74, 75, 76, 77, 78, 79, 80, 81, 82, 83, 84, 85, 86, 87, 88, 89, 90, 91, 92, 93, 94, 95, 96, 97, 98, 99, or 100; from 41 to: 41, 42, 43, 44, 45, 46, 47, 48, 49, 50, 51, 52, 53, 54, 55, 56, 57, 58, 59, 60, 61, 62, 63, 64, 65, 66, 67, 68, 69, 70, 71, 72, 73, 74, 75, 76, 77, 78, 79, 80, 81, 82, 83, 84, 85, 86, 87, 88, 89, 90, 91, 92, 93, 94, 95, 96, 97, 98, 99, or 100; from 42 to: 43, 44, 45, 46, 47, 48, 49, 50, 51, 52, 53, 54, 55, 56, 57, 58, 59, 60, 61, 62, 63, 64, 65, 66, 67, 68, 69, 70, 71, 72, 73, 74, 75, 76, 77, 78, 79, 80, 81, 82, 83, 84, 85, 86, 87, 88, 89, 90, 91, 92, 93, 94, 95, 96, 97, 98, 99, or 100; from 43 to: 44, 45, 46, 47, 48, 49, 50, 51, 52, 53, 54, 55, 56, 57, 58, 59, 60, 61, 62, 63, 64, 65, 66, 67, 68, 69, 70, 71, 72, 73, 74, 75, 76, 77, 78, 79, 80, 81, 82, 83, 84, 85, 86, 87, 88, 89, 90, 91, 92, 93, 94, 95, 96, 97, 98, 99, or 100; from 44 to: 45, 46, 47, 48, 49, 50, 51, 52, 53, 54, 55, 56, 57, 58, 59, 60, 61, 62, 63, 64, 65, 66, 67, 68, 69, 70, 71, 72, 73, 74, 75, 76, 77, 78, 79, 80, 81, 82, 83, 84, 85, 86, 87, 88, 89, 90, 91, 92, 93, 94, 95, 96, 97, 98, 99, or 100; from 45 to: 46, 47, 48, 49, 50, 51, 52, 53, 54, 55, 56, 57, 58, 59, 60, 61, 62, 63, 64, 65, 66, 67, 68, 69, 70, 71, 72, 73, 74, 75, 76, 77, 78, 79, 80, 81, 82, 83, 84, 85, 86, 87, 88, 89, 90, 91, 92, 93, 94, 95, 96, 97, 98, 99, or 100; from 46 to: 47,48, 49, 50, 51, 52, 53, 54, 55, 56, 57, 58, 59, 60, 61, 62, 63, 64, 65, 66, 67, 68, 69, 70, 71, 72, 73, 74, 75, 76, 77, 78, 79, 80, 81, 82, 83, 84, 85, 86, 87, 88, 89, 90, 91, 92, 93, 94, 95, 96, 97, 98, 99, or 100; from 47 to: 48, 49, 50, 51, 52, 53, 54, 55, 56, 57, 58, 59, 60, 61, 62, 63, 64, 65, 66, 67, 68, 69, 70, 71, 72, 73, 74, 75, 76, 77, 78, 79, 80, 81, 82, 83, 84, 85, 86, 87, 88, 89, 90, 91, 92, 93, 94, 95, 96, 97, 98, 99, or 100; from 48 to: 49, 50, 51, 52, 53, 54, 55, 56, 57, 58, 59, 60, 61, 62, 63, 64, 65, 66, 67, 68, 69, 70, 71, 72, 73, 74, 75, 76, 77, 78, 79, 80, 81, 82, 83, 84, 85, 86, 87, 88, 89, 90, 91, 92, 93, 94, 95, 96, 97, 98, 99, or 100; from 49 to: 50, 51, 52, 53, 54, 55, 56, 57, 58, 59, 60, 61, 62, 63, 64, 65, 66, 67, 68, 69, 70, 71, 72, 73, 74, 75, 76, 77, 78, 79, 80, 81, 82, 83, 84, 85, 86, 87, 88, 89, 90, 91, 92, 93, 94, 95, 96, 97, 98, 99, or 100; from 50 to: 51, 52, 53, 54, 55, 56, 57, 58, 59, 60, 61, 62, 63, 64, 65, 66, 67, 68, 69, 70, 71, 72, 73, 74, 75, 76, 77, 78, 79, 80, 81, 82, 83, 84, 85, 86, 87, 88, 89, 90, 91, 92, 93, 94, 95, 96, 97, 98, 99, or 100; from 51 to: 52, 53, 54, 55, 56, 57, 58, 59, 60, 61, 62, 63, 64, 65, 66, 67, 68, 69, 70, 71, 72, 73, 74, 75, 76, 77, 78, 79, 80, 81, 82, 83, 84, 85, 86, 87, 88, 89, 90, 91, 92, 93, 94, 95, 96, 97, 98, 99, or 100; from 52 to: 53, 54, 55, 56, 57, 58, 59, 60, 61, 62, 63, 64, 65, 66, 67, 68, 69, 70, 71, 72, 73, 74, 75, 76, 77, 78, 79, 80, 81, 82, 83, 84, 85, 86, 87, 88, 89, 90, 91, 92, 93, 94, 95, 96, 97, 98, 99, or 100; from 53 to: 54, 55, 56, 57, 58, 59, 60, 61, 62, 63, 64, 65, 66, 67, 68, 69, 70, 71, 72, 73, 74, 75, 76, 77, 78, 79, 80, 81, 82, 83, 84, 85, 86, 87, 88, 89, 90, 91, 92, 93, 94, 95, 96, 97, 98, 99, or 100; from 54 to: 55, 56, 57, 58, 59, 60, 61, 62, 63, 64, 65, 66, 67, 68, 69, 70, 71, 72, 73, 74, 75, 76, 77, 78, 79, 80, 81, 82, 83, 84, 85, 86, 87, 88, 89, 90, 91, 92, 93, 94, 95, 96, 97, 98, 99, or 100; from 55 to: 56, 57, 58, 59, 60, 61, 62, 63, 64, 65, 66, 67, 68, 69, 70, 71, 72, 73, 74, 75, 76, 77, 78, 79, 80, 81, 82, 83, 84, 85, 86, 87, 88, 89, 90, 91, 92, 93, 94, 95, 96, 97, 98, 99, or 100; from 56 to: 57, 58, 59, 60, 61, 62, 63, 64, 65, 66, 67, 68, 69, 70, 71, 72, 73, 74, 75, 76, 77, 78, 79, 80, 81, 82, 83, 84, 85, 86, 87, 88, 89, 90, 91, 92, 93, 94, 95, 96, 97, 98, 99, or 100; from 57 to: 58, 59, 60, 61, 62, 63, 64, 65, 66, 67, 68, 69, 70, 71, 72, 73, 74, 75, 76, 77, 78, 79, 80, 81, 82, 83, 84, 85, 86, 87, 88, 89, 90, 91, 92, 93, 94, 95, 96, 97, 98, 99, or 100; from 58 to: 59, 60, 61, 62, 63, 64, 65, 66, 67, 68, 69, 70, 71, 72, 73, 74, 75, 76, 77, 78, 79, 80, 81, 82, 83, 84, 85, 86, 87, 88, 89, 90, 91, 92, 93, 94, 95, 96, 97, 98, 99, or 100; from 59 to: 60, 61, 62, 63, 64, 65, 66, 67, 68, 69, 70, 71, 72, 73, 74, 75, 76, 77, 78, 79, 80, 81, 82, 83, 84, 85, 86, 87, 88, 89, 90, 91, 92, 93, 94, 95, 96, 97, 98, 99, or 100; from 60 to: 61, 62, 63, 64, 65, 66, 67, 68, 69, 70, 71, 72, 73, 74, 75, 76, 77, 78, 79, 80, 81, 82, 83, 84, 85, 86, 87, 88, 89, 90, 91, 92, 93, 94, 95, 96, 97, 98, 99, or 100; from 61 to: 62, 63, 64, 65, 66, 67, 68, 69, 70, 71, 72, 73, 74, 75, 76, 77, 78, 79, 80, 81, 82, 83, 84, 85, 86, 87, 88, 89, 90, 91, 92, 93, 94, 95, 96, 97, 98, 99, or 100; from 62 to: 63, 64, 65, 66, 67, 68, 69, 70, 71, 72, 73, 74, 75, 76, 77, 78, 79, 80, 81, 82, 83, 84, 85, 86, 87, 88, 89, 90, 91, 92, 93, 94, 95, 96, 97, 98, 99, or 100; from 63 to: 64, 65, 66, 67, 68, 69, 70, 71, 72, 73, 74, 75, 76, 77, 78, 79, 80, 81, 82, 83, 84, 85, 86, 87, 88, 89, 90, 91, 92, 93, 94, 95, 96, 97, 98, 99, or 100; from 64 to: 65, 66, 67, 68, 69, 70, 71, 72, 73, 74, 75, 76, 77, 78, 79, 80, 81, 82, 83, 84, 85, 86, 87, 88, 89, 90, 91, 92, 93, 94, 95, 96, 97, 98, 99, or 100; from 65 to: 66, 67, 68, 69, 70, 71, 72, 73, 74, 75, 76, 77, 78, 79, 80, 81, 82, 83, 84, 85, 86, 87, 88, 89, 90, 91, 92, 93, 94, 95, 96, 97, 98, 99, or 100; from 66 to: 67, 68, 69, 70, 71, 72, 73, 74, 75, 76, 77, 78, 79, 80, 81, 82, 83, 84, 85, 86, 87, 88, 89, 90, 91, 92, 93, 94, 95, 96, 97, 98, 99, or 100; from 67 to: 68, 69, 70, 71, 72, 73, 74, 75, 76, 77, 78, 79, 80, 81, 82, 83, 84, 85, 86, 87, 88, 89, 90, 91, 92, 93, 94, 95, 96, 97, 98, 99, or 100; from 68 to: 69% 70, 71, 72, 73, 74, 75, 76, 77, 78, 79, 80, 81, 82, 83, 84, 85, 86, 87, 88, 89, 90, 91, 92, 93, 94, 95, 96, 97, 98, 99, or 100; from 69 to: 71, 72, 73, 74, 75, 76, 77, 78, 79, 80, 81, 82, 83, 84, 85, 86, 87, 88, 89, 90, 91, 92, 93, 94, 95, 96, 97, 98, 99, or 100; from 70 to: 71, 72, 73, 74, 75, 76, 77, 78, 79, 80, 81, 82, 83, 84, 85, 86, 87, 88, 89, 90, 91, 92, 93, 94, 95, 96, 97, 98, 99, or 100; from 71 to: 72, 73, 74, 75, 76, 77, 78, 79, 80, 81, 82, 83, 84, 85, 86, 87, 88, 89, 90, 91, 92, 93, 94, 95, 96, 97, 98, 99, or 100; from 72 to: 73, 74, 75, 76, 77, 78, 79, 80, 81, 82, 83, 84, 85, 86, 87, 88, 89, 90, 91, 92, 93, 94, 95, 96, 97, 98, 99, or 100; from 73 to: 74, 75, 76, 77, 78, 79, 80, 81, 82, 83, 84, 85, 86, 87, 88, 89, 90, 91, 92, 93, 94, 95, 96, 97, 98, 99, or 100; from 74 to: 75, 76, 77, 78, 79, 80, 81, 82, 83, 84, 85, 86, 87, 88, 89, 90, 91, 92, 93, 94, 95, 96, 97, 98, 99, or 100; or from 75 to: 76, 77, 78, 79, 80, 81, 82, 83, 84, 85, 86, 87, 88, 89, 90, 91, 92, 93, 94, 95, 96, 97, 98, 99, or 100 adenosine monophosphate residues.

[0197] In some embodiments, the poly(A) tail comprises, consists of, consists essentially of, has, or is from 20 to: 21, 22, 23, 24, 25, 26, 27, 28, 29, 30, 31, 32, 33, 34, 35, 36, 37, 38, 39, 40, 41, 42, 43, 44, 45, 46, 47, 48, 49, 50, 51, 52, 53, 54, 55, 56, 57, 58, 59, 60, 61, 62, 63, 64, 65, 66, 67, 68, 69, 70, 71, 72, 73, 74, 75, 76, 77, 78, 79, 80, 81, 82, 83, 84, 85, 86, 87, 88, 89, 90, 91, 92, 93, 94, 95, 96, 97, 98, 99, or 100; from 21 to: 22, 23, 24, 25, 26, 27, 28, 29, 30, 31, 32, 33, 34, 35, 36, 37, 38, 39, 40, 41, 42, 43, 44, 45, 46, 47, 48, 49, 50, 51, 52, 53, 54, 55, 56, 57, 58, 59, 60, 61, 62, 63, 64, 65, 66, 67, 68, 69, 70, 71, 72, 73, 74, 75, 76, 77, 78, 79, 80, 81, 82, 83, 84, 85, 86, 87, 88, 89, 90, 91, 92, 93, 94, 95, 96, 97, 98, 99, or 100; from 22 to: 23, 24, 25, 26, 27, 28, 29, 30, 31, 32, 33, 34, 35, 36, 37, 38, 39, 40, 41, 42, 43, 44, 45, 46, 47, 48, 49, 50, 51, 52, 53, 54, 55, 56, 57, 58, 59, 60, 61, 62, 63, 64, 65, 66, 67, 68, 69, 70, 71, 72, 73, 74, 75, 76, 77, 78, 79, 80, 81, 82, 83, 84, 85, 86, 87, 88, 89, 90, 91, 92, 93, 94, 95, 96, 97, 98, 99, or 100; from 23 to: 24, 25, 26, 27, 28, 29, 30, 31, 32, 33, 34, 35, 36, 37, 38, 39, 40, 41, 42, 43, 44, 45, 46, 47, 48, 49, 50, 51, 52, 53, 54, 55, 56, 57, 58, 59, 60, 61, 62, 63, 64, 65, 66, 67, 68, 69, 70, 71, 72, 73, 74, 75, 76, 77, 78, 79, 80, 81, 82, 83, 84, 85, 86, 87, 88, 89, 90, 91, 92, 93, 94, 95, 96, 97, 98, 99, or 100; from 24 to: 25, 26, 27, 28, 29, 30, 31, 32, 33, 34, 35, 36, 37, 38, 39, 40, 41, 42, 43, 44, 45, 46, 47, 48, 49, 50, 51, 52, 53, 54, 55, 56, 57, 58, 59, 60, 61, 62, 63, 64, 65, 66, 67, 68, 69, 70, 71, 72, 73, 74, 75, 76, 77, 78, 79, 80, 81, 82, 83, 84, 85, 86, 87, 88, 89, 90, 91, 92, 93, 94, 95, 96, 97, 98, 99, or 100; from 25 to: 26, 27, 28, 29, 30, 31, 32, 33, 34, 35, 36, 37, 38, 39, 40, 41, 42, 43, 44, 45, 46, 47, 48, 49, 50, 51, 52, 53, 54, 55, 56, 57, 58, 59, 60, 61, 62, 63, 64, 65, 66, 67, 68, 69, 70, 71, 72, 73, 74, 75, 76, 77, 78, 79, 80, 81, 82, 83, 84, 85, 86, 87, 88, 89, 90, 91, 92, 93, 94, 95, 96, 97, 98, 99, or 100; from 26 to: 27, 28, 29, 30, 31, 32, 33, 34, 35, 36, 37, 38, 39, 40, 41, 42, 43, 44, 45, 46, 47, 48,49, 50, 51, 52, 53, 54, 55, 56, 57, 58, 59, 60, 61, 62, 63, 64, 65, 66, 67, 68, 69, 70, 71, 72, 73, 74, 75, 76, 77, 78, 79, 80, 81, 82, 83, 84, 85, 86, 87, 88, 89, 90, 91, 92, 93, 94, 95, 96, 97, 98, 99, or 100; from 27 to: 28, 29, 30, 31, 32, 33, 34, 35, 36, 37, 38, 39, 40, 41, 42, 43, 44, 45, 46, 47, 48, 49, 50, 51, 52, 53, 54, 55, 56, 57, 58, 59, 60, 61, 62, 63, 64, 65, 66, 67, 68, 69, 70, 71, 72, 73, 74, 75, 76, 77, 78, 79, 80, 81, 82, 83, 84, 85, 86, 87, 88, 89, 90, 91, 92, 93, 94, 95, 96, 97, 98, 99, or 100; from 28 to: 29, 30, 31, 32, 33, 34, 35, 36, 37, 38, 39, 40, 41, 42, 43, 44, 45, 46, 47, 48, 49, 50, 51, 52, 53, 54, 55, 56, 57, 58, 59, 60, 61, 62, 63, 64, 65, 66, 67, 68, 69, 70, 71, 72, 73, 74, 75, 76, 77, 78, 79, 80, 81, 82, 83, 84, 85, 86, 87, 88, 89, 90, 91, 92, 93, 94, 95, 96, 97, 98, 99, or 100; from 29 to: 30, 31, 32, 33, 34, 35, 36, 37, 38, 39, 40, 41, 42, 43, 44, 45, 46, 47, 48, 49, 50, 51, 52, 53, 54, 55, 56, 57, 58, 59, 60, 61, 62, 63, 64, 65, 66, 67, 68, 69, 70, 71, 72, 73, 74, 75, 76, 77, 78, 79, 80, 81, 82, 83, 84, 85, 86, 87, 88, 89, 90, 91, 92, 93, 94, 95, 96, 97, 98, 99, or 100; from 30 to: 31, 32, 33, 34, 35, 36, 37, 38, 39, 40, 41, 42, 43, 44, 45, 46, 47, 48, 49, 50, 51, 52, 53, 54, 55, 56, 57, 58, 59, 60, 61, 62, 63, 64, 65, 66, 67, 68, 69, 70, 71, 72, 73, 74, 75, 76, 77, 78, 79, 80, 81, 82, 83, 84, 85, 86, 87, 88, 89, 90, 91, 92, 93, 94, 95, 96, 97, 98, 99, or 100; from 31 to: 32, 33, 34, 35, 36, 37, 38, 39, 40, 41, 42, 43, 44, 45, 46, 47, 48, 49, 50, 51, 52, 53, 54, 55, 56, 57, 58, 59, 60, 61, 62, 63, 64, 65, 66, 67, 68, 69, 70, 71, 72, 73, 74, 75, 76, 77, 78, 79, 80, 81, 82, 83, 84, 85, 86, 87, 88, 89, 90, 91, 92, 93, 94, 95, 96, 97, 98, 99, or 100; from 32 to: 33, 34, 35, 36, 37, 38, 39, 40, 41, 42, 43, 44, 45, 46, 47, 48, 49, 50, 51, 52, 53, 54, 55, 56, 57, 58, 59, 60, 61, 62, 63, 64, 65, 66, 67, 68, 69, 70, 71, 72, 73, 74, 75, 76, 77, 78, 79, 80, 81, 82, 83, 84, 85, 86, 87, 88, 89, 90, 91, 92, 93, 94, 95, 96, 97, 98, 99, or 100; from 33 to: 34, 35, 36, 37, 38, 39, 40, 41, 42, 43, 44, 45, 46, 47, 48, 49, 50, 51, 52, 53, 54, 55, 56, 57, 58, 59, 60, 61, 62, 63, 64, 65, 66, 67, 68, 69, 70, 71, 72, 73, 74, 75, 76, 77, 78, 79, 80, 81, 82, 83, 84, 85, 86, 87, 88, 89, 90, 91, 92, 93, 94, 95, 96, 97, 98, 99, or 100; from 34 to: 35, 36, 37, 38, 39, 40, 41, 42, 43, 44, 45, 46, 47, 48, 49, 50, 51, 52, 53, 54, 55, 56, 57, 58, 59, 60, 61, 62, 63, 64, 65, 66, 67, 68, 69, 70, 71, 72, 73, 74, 75, 76, 77, 78, 79, 80, 81, 82, 83, 84, 85, 86, 87, 88, 89, 90, 91, 92, 93, 94, 95, 96, 97, 98, 99, or 100; from 35 to: 36, 37, 38, 39, 40, 41, 42, 43, 44, 45, 46, 47, 48, 49, 50, 51, 52, 53, 54, 55, 56, 57, 58, 59, 60, 61, 62, 63, 64, 65, 66, 67, 68, 69, 70, 71, 72, 73, 74, 75, 76, 77, 78, 79, 80, 81, 82, 83, 84, 85, 86, 87, 88, 89, 90, 91, 92, 93, 94, 95, 96, 97, 98, 99, or 100; from 36 to: 37, 38, 39, 40, 41, 42, 43, 44, 45, 46, 47, 48, 49, 50, 51, 52, 53, 54, 55, 56, 57, 58, 59, 60, 61, 62, 63, 64, 65, 66, 67, 68, 69, 70, 71, 72, 73, 74, 75, 76, 77, 78, 79, 80, 81, 82, 83, 84, 85, 86, 87, 88, 89, 90, 91, 92, 93, 94, 95, 96, 97, 98, 99, or 100; from 37 to: 38, 39, 40, 41, 42, 43, 44, 45, 46, 47, 48, 49, 50, 51, 52, 53, 54, 55, 56, 57, 58, 59, 60, 61, 62, 63, 64, 65, 66, 67, 68, 69, 70, 71, 72, 73, 74, 75, 76, 77, 78, 79, 80, 81, 82, 83, 84, 85, 86, 87, 88, 89, 90, 91, 92, 93, 94, 95, 96, 97, 98, 99, or 100; from 38 to: 39, 40, 41, 42, 43, 44, 45, 46, 47, 48, 49, 50, 51, 52, 53, 54, 55, 56, 57, 58, 59, 60, 61, 62, 63, 64, 65, 66, 67, 68, 69, 70, 71, 72, 73, 74, 75, 76, 77, 78, 79, 80, 81, 82, 83, 84, 85, 86, 87, 88, 89, 90, 91, 92, 93, 94, 95, 96, 97, 98, 99, or 100; from 39 to: 40, 41, 42, 43, 44, 45, 46, 47, 48, 49, 50, 51, 52, 53, 54, 55, 56, 57, 58, 59, 60, 61, 62, 63, 64, 65, 66, 67, 68, 69, 70, 71, 72, 73, 74, 75, 76, 77, 78, 79, 80, 81, 82, 83, 84, 85, 86, 87, 88, 89, 90, 91, 92, 93, 94, 95, 96, 97, 98, 99, or 100; from 40 to: 41, 42, 43, 44, 45, 46, 47, 48, 49, 50, 51, 52, 53, 54, 55, 56, 57, 58, 59, 60, 61, 62, 63, 64, 65, 66, 67, 68, 69, 70, 71, 72, 73, 74, 75, 76, 77, 78, 79, 80, 81, 82, 83, 84, 85, 86, 87, 88, 89, 90, 91, 92, 93, 94, 95, 96, 97, 98, 99, or 100; from 41 to: 41, 42, 43, 44, 45, 46, 47, 48, 49, 50, 51, 52, 53, 54, 55, 56, 57, 58, 59, 60, 61, 62, 63, 64, 65, 66, 67, 68, 69, 70, 71, 72, 73, 74, 75, 76, 77, 78, 79, 80, 81, 82, 83, 84, 85, 86, 87, 88, 89, 90, 91, 92, 93, 94, 95, 96, 97, 98, 99, or 100; from 42 to: 43, 44, 45, 46, 47, 48, 49, 50, 51, 52, 53, 54, 55, 56, 57, 58, 59, 60, 61, 62, 63, 64, 65, 66, 67, 68, 69, 70, 71, 72, 73, 74, 75, 76, 77, 78, 79, 80, 81, 82, 83, 84, 85, 86, 87, 88, 89, 90, 91, 92, 93, 94, 95, 96, 97, 98, 99, or 100; from 43 to: 44, 45, 46, 47, 48, 49, 50, 51, 52, 53, 54, 55, 56, 57, 58, 59, 60, 61, 62, 63, 64, 65, 66, 67, 68, 69, 70, 71, 72, 73, 74, 75, 76, 77, 78, 79, 80, 81, 82, 83, 84, 85, 86, 87, 88, 89, 90, 91, 92, 93, 94, 95, 96, 97, 98, 99, or 100; from 44 to: 45, 46, 47, 48, 49, 50, 51, 52, 53, 54, 55, 56, 57, 58, 59, 60, 61, 62, 63, 64, 65, 66, 67, 68, 69, 70, 71, 72, 73, 74, 75, 76, 77, 78, 79, 80, 81, 82, 83, 84, 85, 86, 87, 88, 89, 90, 91, 92, 93, 94, 95, 96, 97, 98, 99, or 100; from 45 to: 46, 47, 48, 49, 50, 51, 52, 53, 54, 55, 56, 57, 58, 59, 60, 61, 62, 63, 64, 65, 66, 67, 68, 69, 70, 71, 72, 73, 74, 75, 76, 77, 78, 79, 80, 81, 82, 83, 84, 85, 86, 87, 88, 89, 90, 91, 92, 93, 94, 95, 96, 97, 98, 99, or 100; from 46 to: 47,48, 49, 50, 51, 52, 53, 54, 55, 56, 57, 58, 59, 60, 61, 62, 63, 64, 65, 66, 67, 68, 69, 70, 71, 72, 73, 74, 75, 76, 77, 78, 79, 80, 81, 82, 83, 84, 85, 86, 87, 88, 89, 90, 91, 92, 93, 94, 95, 96, 97, 98, 99, or 100; from 47 to: 48, 49, 50, 51, 52, 53, 54, 55, 56, 57, 58, 59, 60, 61, 62, 63, 64, 65, 66, 67, 68, 69, 70, 71, 72, 73, 74, 75, 76, 77, 78, 79, 80, 81, 82, 83, 84, 85, 86, 87, 88, 89, 90, 91, 92, 93, 94, 95, 96, 97, 98, 99, or 100; from 48 to: 49, 50, 51, 52, 53, 54, 55, 56, 57, 58, 59, 60, 61, 62, 63, 64, 65, 66, 67, 68, 69, 70, 71, 72, 73, 74, 75, 76, 77, 78, 79, 80, 81, 82, 83, 84, 85, 86, 87, 88, 89, 90, 91, 92, 93, 94, 95, 96, 97, 98, 99, or 100; from 49 to: 50, 51, 52, 53, 54, 55, 56, 57, 58, 59, 60, 61, 62, 63, 64, 65, 66, 67, 68, 69, 70, 71, 72, 73, 74, 75, 76, 77, 78, 79, 80, 81, 82, 83, 84, 85, 86, 87, 88, 89, 90, 91, 92, 93, 94, 95, 96, 97, 98, 99, or 100; from 50 to: 51, 52, 53, 54, 55, 56, 57, 58, 59, 60, 61, 62, 63, 64, 65, 66, 67, 68, 69, 70, 71, 72, 73, 74, 75, 76, 77, 78, 79, 80, 81, 82, 83, 84, 85, 86, 87, 88, 89, 90, 91, 92, 93, 94, 95, 96, 97, 98, 99, or 100; from 51 to: 52, 53, 54, 55, 56, 57, 58, 59, 60, 61, 62, 63, 64, 65, 66, 67, 68, 69, 70, 71, 72, 73, 74, 75, 76, 77, 78, 79, 80, 81, 82, 83, 84, 85, 86, 87, 88, 89, 90, 91, 92, 93, 94, 95, 96, 97, 98, 99, or 100; from 52 to: 53, 54, 55, 56, 57, 58, 59, 60, 61, 62, 63, 64, 65, 66, 67, 68, 69, 70, 71, 72, 73, 74, 75, 76, 77, 78, 79, 80, 81, 82, 83, 84, 85, 86, 87, 88, 89, 90, 91, 92, 93, 94, 95, 96, 97, 98, 99, or 100; from 53 to: 54, 55, 56, 57, 58, 59, 60, 61, 62, 63, 64, 65, 66, 67, 68, 69, 70, 71, 72, 73, 74, 75, 76, 77, 78, 79, 80, 81, 82, 83, 84, 85, 86, 87, 88, 89, 90, 91, 92, 93, 94, 95, 96, 97, 98, 99, or 100; from 54 to: 55, 56, 57, 58, 59, 60, 61, 62, 63, 64, 65, 66, 67, 68, 69, 70, 71, 72, 73, 74, 75, 76, 77, 78, 79, 80, 81, 82, 83, 84, 85, 86, 87, 88, 89, 90, 91, 92, 93, 94, 95, 96, 97, 98, 99, or 100; from 55 to: 56, 57, 58, 59, 60, 61, 62, 63, 64, 65, 66, 67, 68, 69, 70, 71, 72, 73, 74, 75, 76, 77, 78, 79, 80, 81, 82, 83, 84, 85, 86, 87, 88, 89, 90, 91, 92, 93, 94, 95, 96, 97, 98, 99, or 100; from 56 to: 57, 58, 59, 60, 61, 62, 63, 64, 65, 66, 67, 68, 69, 70, 71, 72, 73, 74, 75, 76, 77, 78, 79, 80, 81, 82, 83, 84, 85, 86, 87, 88, 89, 90, 91, 92, 93, 94, 95, 96, 97, 98, 99, or 100; from 57 to: 58, 59, 60, 61, 62, 63, 64, 65, 66, 67, 68, 69, 70, 71, 72, 73, 74, 75, 76, 77, 78, 79, 80, 81, 82, 83, 84, 85, 86, 87, 88, 89, 90, 91, 92, 93, 94, 95, 96, 97, 98, 99, or 100; from 58 to: 59, 60, 61, 62, 63, 64, 65, 66, 67, 68, 69, 70, 71, 72, 73, 74, 75, 76, 77, 78, 79, 80, 81, 82, 83, 84, 85, 86, 87, 88, 89, 90, 91, 92, 93, 94, 95, 96, 97, 98, 99, or 100; from 59 to: 60, 61, 62, 63, 64, 65, 66, 67, 68, 69, 70, 71, 72, 73, 74, 75, 76, 77, 78, 79, 80, 81, 82, 83, 84, 85, 86, 87, 88, 89, 90, 91, 92, 93, 94, 95, 96, 97, 98, 99, or 100; from 60 to: 61, 62, 63, 64, 65, 66, 67, 68, 69, 70, 71, 72, 73, 74, 75, 76, 77, 78, 79, 80, 81, 82, 83, 84, 85, 86, 87, 88, 89, 90, 91, 92, 93, 94, 95, 96, 97, 98, 99, or 100; from 61 to: 62, 63, 64, 65, 66, 67, 68, 69, 70, 71, 72, 73, 74, 75, 76, 77, 78, 79, 80, 81, 82, 83, 84, 85, 86, 87, 88, 89, 90, 91, 92, 93, 94, 95, 96, 97, 98, 99, or 100; from 62 to: 63, 64, 65, 66, 67, 68, 69, 70, 71, 72, 73, 74, 75, 76, 77, 78, 79, 80, 81, 82, 83, 84, 85, 86, 87, 88, 89, 90, 91, 92, 93, 94, 95, 96, 97, 98, 99, or 100; from 63 to: 64, 65, 66, 67, 68, 69, 70, 71, 72, 73, 74, 75, 76, 77, 78, 79, 80, 81, 82, 83, 84, 85, 86, 87, 88, 89, 90, 91, 92, 93, 94, 95, 96, 97, 98, 99, or 100; from 64 to: 65, 66, 67, 68, 69, 70, 71, 72, 73, 74, 75, 76, 77, 78, 79, 80, 81, 82, 83, 84, 85, 86, 87, 88, 89, 90, 91, 92, 93, 94, 95, 96, 97, 98, 99, or 100; from 65 to: 66, 67, 68, 69, 70, 71, 72, 73, 74, 75, 76, 77, 78, 79, 80, 81, 82, 83, 84, 85, 86, 87, 88, 89, 90, 91, 92, 93, 94, 95, 96, 97, 98, 99, or 100; from 66 to: 67, 68, 69, 70, 71, 72, 73, 74, 75, 76, 77, 78, 79, 80, 81, 82, 83, 84, 85, 86, 87, 88, 89, 90, 91, 92, 93, 94, 95, 96, 97, 98, 99, or 100; from 67 to: 68, 69, 70, 71, 72, 73, 74, 75, 76, 77, 78, 79, 80, 81, 82, 83, 84, 85, 86, 87, 88, 89, 90, 91, 92, 93, 94, 95, 96, 97, 98, 99, or 100; from 68 to: 69% 70, 71, 72, 73, 74, 75, 76, 77, 78, 79, 80, 81, 82, 83, 84, 85, 86, 87, 88, 89, 90, 91, 92, 93, 94, 95, 96, 97, 98, 99, or 100; from 69 to: 71, 72, 73, 74, 75, 76, 77, 78, 79, 80, 81, 82, 83, 84, 85, 86, 87, 88, 89, 90, 91, 92, 93, 94, 95, 96, 97, 98, 99, or 100; from 70 to: 71, 72, 73, 74, 75, 76, 77, 78, 79, 80, 81, 82, 83, 84, 85, 86, 87, 88, 89, 90, 91, 92, 93, 94, 95, 96, 97, 98, 99, or 100; from 71 to: 72, 73, 74, 75, 76, 77, 78, 79, 80, 81, 82, 83, 84, 85, 86, 87, 88, 89, 90, 91, 92, 93, 94, 95, 96, 97, 98, 99, or 100; from 72 to: 73, 74, 75, 76, 77, 78, 79, 80, 81, 82, 83, 84, 85, 86, 87, 88, 89, 90, 91, 92, 93, 94, 95, 96, 97, 98, 99, or 100; from 73 to: 74, 75, 76, 77, 78, 79, 80, 81, 82, 83, 84, 85, 86, 87, 88, 89, 90, 91, 92, 93, 94, 95, 96, 97, 98, 99, or 100; from 74 to: 75, 76, 77, 78, 79, 80, 81, 82, 83, 84, 85, 86, 87, 88, 89, 90, 91, 92, 93, 94, 95, 96, 97, 98, 99, or 100; or from 75 to: 76, 77, 78, 79, 80, 81, 82, 83, 84, 85, 86, 87, 88, 89, 90, 91, 92, 93, 94, 95, 96, 97, 98, 99, or 100 consecutive adenosine monophosphate residues.

[0198] Also contemplated and supported are combinations of “adenosine monophosphate residues” of “at least” and any of the above-noted “adenosine monophosphate residues” of “no more than” with the number of adenosine monophosphate residues provided in an Example of this document. Also contemplated and supported are combinations of the adenosine monophosphate residues of the Example section of this document to provide a range (i.e. the number of adenosine monophosphate residues from [the number of adenosine monophosphate residues in RNA X₁ in the Examples] to [the number of adenosine monophosphate residues to [the number of adenosine monophosphate residues in RNA X₂ in the Examples] wherein X₁ and X₂ represent any two exemplary RNA molecules of the Examples.

[0199] In some embodiments, the RNA comprises a 3′ segmented poly(A) tail comprising a first segment of consecutive adenosine monophosphate residues, a spacer, and a second segment of consecutive adenosine monophosphate residues. In some embodiments, the 3′ segmented poly(A) tail is ordered from 5′ to 3′ as the first segment of consecutive adenosine monophosphate residues, the spacer, and the second segment of consecutive adenosine monophosphate residues. In some embodiments, the 3′ segmented poly(A) tail is 3′ from the 3′ UTR. In some embodiments, the 3′ segmented poly(A)) tail at the 3′ end of the recombinant RNA.

[0200] In some embodiments, the first segment of consecutive adenosine monophosphate residues comprises, consists of, consists essentially of, has, or is at least 20, 21, 22, 23, 24, 25, 26, 27, 28, 29, 30, 31, 32, 33, 34, 35, 36, 37, 38, 39, 40, 41, 42, 43, 44, 45, 46, 47, 48, 49, 50, 51, 52, 53, 54, 55, 56, 57, 58, 59, 60, 61, 62, 63, 64, 65, 66, 67, 68, 69, 70, 71, 72, 73, 74, 75, 76, 77, 78, 79, 80, 81, 82, 83, 84, 85, 86, 87, 88, 89, 90, 91, 92, 93, 94, 95, 96, 97, 98, 99, 100, 101, 102, 103, 104, 105,106,107, 108, 109, 110, 111, 112, 113, 114, 115, 116, 117, 118, 119, or 120 adenosine monophosphate residues.

[0201] In some embodiments, the first segment of consecutive adenosine monophosphate residues comprises, consists of, consists essentially of, has, or is no more than: 30, 31, 32, 33, 34, 35, 36, 37, 38, 39, 40, 41, 42, 43, 44, 45, 46, 47, 48, 49, 50, 51, 52, 53, 54, 55, 56, 57, 58, 59, 60, 61, 62, 63, 64, 65, 66, 67, 68, 69, 70, 71, 72, 73, 74, 75, 76, 77, 78, 79, 80, 81, 82, 83, 84, 85, 86, 87, 88, 89, 90, 91, 92, 93, 94, 95, 96, 97, 98, 99, 100, 101, 102, 103,104,105,106,107,108, 109, 110, 111, 112, 113, 114, 115, 116, 117, 118, 119, or 120 adenosine monophosphate residues.

[0202] Taking the above-noted embodiments into account, it is contemplated and supported that any of the above-noted “adenosine monophosphate residues” of “at least” and any of the above-noted “adenosine monophosphate residues” of “no more than” may be combined to provide an enclosed range (i.e. the first segment of consecutive adenosine monophosphate residues comprising from 60 to 90 consecutive adenosine monophosphate residues).

[0203] In some embodiments, the first segment of consecutive adenosine monophosphate residues comprises, consists of, consists essentially of, has, or is from 20 to: 21, 22, 23, 24, 25, 26, 27, 28, 29, 30, 31, 32, 33, 34, 35, 36, 37, 38, 39, 40, 41, 42, 43, 44, 45, 46, 47, 48, 49, 50, 51, 52, 53, 54, 55, 56, 57, 58, 59, 60, 61, 62, 63, 64, 65, 66, 67, 68, 69, 70, 71, 72, 73, 74, 75, 76, 77, 78, 79, 80, 81, 82, 83, 84, 85, 86, 87, 88, 89, 90, 91, 92, 93, 94, 95, 96, 97, 98, 99, or 100; from 21 to: 22, 23, 24, 25, 26, 27, 28, 29, 30, 31, 32, 33, 34, 35, 36, 37, 38, 39, 40, 41, 42, 43, 44, 45, 46, 47, 48, 49, 50, 51, 52, 53, 54, 55, 56, 57, 58, 59, 60, 61, 62, 63, 64, 65, 66, 67, 68, 69, 70, 71, 72, 73, 74, 75, 76, 77, 78, 79, 80, 81, 82, 83, 84, 85, 86, 87, 88, 89, 90, 91, 92, 93, 94, 95, 96, 97, 98, 99, or 100; from 22 to: 23, 24, 25, 26, 27, 28, 29, 30, 31, 32, 33, 34, 35, 36, 37, 38, 39, 40, 41, 42, 43, 44, 45, 46, 47, 48, 49, 50, 51, 52, 53, 54, 55, 56, 57, 58, 59, 60, 61, 62, 63, 64, 65, 66, 67, 68, 69, 70, 71, 72, 73, 74, 75, 76, 77, 78, 79, 80, 81, 82, 83, 84, 85, 86, 87, 88, 89, 90, 91, 92, 93, 94, 95, 96, 97, 98, 99, or 100; from 23 to: 24, 25, 26, 27, 28, 29, 30, 31, 32, 33, 34, 35, 36, 37, 38, 39, 40, 41, 42, 43, 44, 45, 46, 47, 48, 49, 50, 51, 52, 53, 54, 55, 56, 57, 58, 59, 60, 61, 62, 63, 64, 65, 66, 67, 68, 69, 70, 71, 72, 73, 74, 75, 76, 77, 78, 79, 80, 81, 82, 83, 84, 85, 86, 87, 88, 89, 90, 91, 92, 93, 94, 95, 96, 97, 98, 99, or 100; from 24 to: 25, 26, 27, 28, 29, 30, 31, 32, 33, 34, 35, 36, 37, 38, 39, 40, 41, 42, 43, 44, 45, 46, 47, 48, 49, 50, 51, 52, 53, 54, 55, 56, 57, 58, 59, 60, 61, 62, 63, 64, 65, 66, 67, 68, 69, 70, 71, 72, 73, 74, 75, 76, 77, 78, 79, 80, 81, 82, 83, 84, 85, 86, 87, 88, 89, 90, 91, 92, 93, 94, 95, 96, 97, 98, 99, or 100; from 25 to: 26, 27, 28, 29, 30, 31, 32, 33, 34, 35, 36, 37, 38, 39, 40, 41, 42, 43, 44, 45, 46, 47, 48, 49, 50, 51, 52, 53, 54, 55, 56, 57, 58, 59, 60, 61, 62, 63, 64, 65, 66, 67, 68, 69, 70, 71, 72, 73, 74, 75, 76, 77, 78, 79, 80, 81, 82, 83, 84, 85, 86, 87, 88, 89, 90, 91, 92, 93, 94, 95, 96, 97, 98, 99, or 100; from 26 to: 27, 28, 29, 30, 31, 32, 33, 34, 35, 36, 37, 38, 39, 40, 41, 42, 43, 44, 45, 46, 47, 48, 49, 50, 51, 52, 53, 54, 55, 56, 57, 58, 59, 60, 61, 62, 63, 64, 65, 66, 67, 68, 69, 70, 71, 72, 73, 74, 75, 76, 77, 78, 79, 80, 81, 82, 83, 84, 85, 86, 87, 88, 89, 90, 91, 92, 93, 94, 95, 96, 97, 98, 99, or 100; from 27 to: 28, 29, 30, 31, 32, 33, 34, 35, 36, 37, 38, 39, 40, 41, 42, 43, 44, 45, 46, 47, 48, 49, 50, 51, 52, 53, 54, 55, 56, 57, 58, 59, 60, 61, 62, 63, 64, 65, 66, 67, 68, 69, 70, 71, 72, 73, 74, 75, 76, 77, 78, 79, 80, 81, 82, 83, 84, 85, 86, 87, 88, 89, 90, 91, 92, 93, 94, 95, 96, 97, 98, 99, or 100; from 28 to: 29, 30, 31, 32, 33, 34, 35, 36, 37, 38, 39, 40, 41, 42, 43, 44, 45, 46, 47, 48, 49, 50, 51, 52, 53, 54, 55, 56, 57, 58, 59, 60, 61, 62, 63, 64, 65, 66, 67, 68, 69, 70, 71, 72, 73, 74, 75, 76, 77, 78, 79, 80, 81, 82, 83, 84, 85, 86, 87, 88, 89, 90, 91, 92, 93, 94, 95, 96, 97, 98, 99, or 100; from 29 to: 30, 31, 32, 33, 34, 35, 36, 37, 38, 39, 40, 41, 42, 43, 44, 45, 46, 47, 48, 49, 50, 51, 52, 53, 54, 55, 56, 57, 58, 59, 60, 61, 62, 63, 64, 65, 66, 67, 68, 69, 70, 71, 72, 73, 74, 75, 76, 77, 78, 79, 80, 81, 82, 83, 84, 85, 86, 87, 88, 89, 90, 91, 92, 93, 94, 95, 96, 97, 98, 99, or 100; from 30 to: 31, 32, 33, 34, 35, 36, 37, 38, 39, 40, 41, 42, 43, 44, 45, 46, 47, 48, 49, 50, 51, 52, 53, 54, 55, 56, 57, 58, 59, 60, 61, 62, 63, 64, 65, 66, 67, 68, 69, 70, 71, 72, 73, 74, 75, 76, 77, 78, 79, 80, 81, 82, 83, 84, 85, 86, 87, 88, 89, 90, 91, 92, 93, 94, 95, 96, 97, 98, 99, or 100; from 31 to: 32, 33, 34, 35, 36, 37, 38, 39, 40, 41, 42, 43, 44, 45, 46, 47, 48, 49, 50, 51, 52, 53, 54, 55, 56, 57, 58, 59, 60, 61, 62, 63, 64, 65, 66, 67, 68, 69, 70, 71, 72, 73, 74, 75, 76, 77, 78, 79, 80, 81, 82, 83, 84, 85, 86, 87, 88, 89, 90, 91, 92, 93, 94, 95, 96, 97, 98, 99, or 100; from 32 to: 33, 34, 35, 36, 37, 38, 39, 40, 41, 42, 43, 44, 45, 46, 47, 48, 49, 50, 51, 52, 53, 54, 55, 56, 57, 58, 59, 60, 61, 62, 63, 64, 65, 66, 67, 68, 69, 70, 71, 72, 73, 74, 75, 76, 77, 78, 79, 80, 81, 82, 83, 84, 85, 86, 87, 88, 89, 90, 91, 92, 93, 94, 95, 96, 97, 98, 99, or 100; from 33 to: 34, 35, 36, 37, 38, 39, 40, 41, 42, 43, 44, 45, 46, 47, 48, 49, 50, 51, 52, 53, 54, 55, 56, 57, 58, 59, 60, 61, 62, 63, 64, 65, 66, 67, 68, 69, 70, 71, 72, 73, 74, 75, 76, 77, 78, 79, 80, 81, 82, 83, 84, 85, 86, 87, 88, 89, 90, 91, 92, 93, 94, 95, 96, 97, 98, 99, or 100; from 34 to: 35, 36, 37, 38, 39, 40, 41, 42, 43, 44, 45, 46, 47, 48, 49, 50, 51, 52, 53, 54, 55, 56, 57, 58, 59, 60, 61, 62, 63, 64, 65, 66, 67, 68, 69, 70, 71, 72, 73, 74, 75, 76, 77, 78, 79, 80, 81, 82, 83, 84, 85, 86, 87, 88, 89, 90, 91, 92, 93, 94, 95, 96, 97, 98, 99, or 100; from 35 to: 36, 37, 38, 39, 40, 41, 42, 43, 44, 45, 46, 47, 48, 49, 50, 51, 52, 53, 54, 55, 56, 57, 58, 59, 60, 61, 62, 63, 64, 65, 66, 67, 68, 69, 70, 71, 72, 73, 74, 75, 76, 77, 78, 79, 80, 81, 82, 83, 84, 85, 86, 87, 88, 89, 90, 91, 92, 93, 94, 95, 96, 97, 98, 99, or 100; from 36 to: 37, 38, 39, 40, 41, 42, 43, 44, 45, 46, 47, 48, 49, 50, 51, 52, 53, 54, 55, 56, 57, 58, 59, 60, 61, 62, 63, 64, 65, 66, 67, 68, 69, 70, 71, 72, 73, 74, 75, 76, 77, 78, 79, 80, 81, 82, 83, 84, 85, 86, 87, 88, 89, 90, 91, 92, 93, 94, 95, 96, 97, 98, 99, or 100; from 37 to: 38, 39, 40, 41, 42, 43, 44, 45, 46, 47, 48, 49, 50, 51, 52, 53, 54, 55, 56, 57, 58, 59, 60, 61, 62, 63, 64, 65, 66, 67, 68, 69, 70, 71, 72, 73, 74, 75, 76, 77, 78, 79, 80, 81, 82, 83, 84, 85, 86, 87, 88, 89, 90, 91, 92, 93, 94, 95, 96, 97, 98, 99, or 100; from 38 to: 39, 40, 41, 42, 43, 44, 45, 46, 47, 48, 49, 50, 51, 52, 53, 54, 55, 56, 57, 58, 59, 60, 61, 62, 63, 64, 65, 66, 67, 68, 69, 70, 71, 72, 73, 74, 75, 76, 77, 78, 79, 80, 81, 82, 83, 84, 85, 86, 87, 88, 89, 90, 91, 92, 93, 94, 95, 96, 97, 98, 99, or 100; from 39 to: 40, 41, 42, 43, 44, 45, 46, 47, 48, 49, 50, 51, 52, 53, 54, 55, 56, 57, 58, 59, 60, 61, 62, 63, 64, 65, 66, 67, 68, 69, 70, 71, 72, 73, 74, 75, 76, 77, 78, 79, 80, 81, 82, 83, 84, 85, 86, 87, 88, 89, 90, 91, 92, 93, 94, 95, 96, 97, 98, 99, or 100; from 40 to: 41, 42, 43, 44, 45, 46, 47, 48, 49, 50, 51, 52, 53, 54, 55, 56, 57, 58, 59, 60, 61, 62, 63, 64, 65, 66, 67, 68, 69, 70, 71, 72, 73, 74, 75, 76, 77, 78, 79, 80, 81, 82, 83, 84, 85, 86, 87, 88, 89, 90, 91, 92, 93, 94, 95, 96, 97, 98, 99, or 100; from 41 to: 41, 42, 43, 44, 45, 46, 47, 48, 49, 50, 51, 52, 53, 54, 55, 56, 57, 58, 59, 60, 61, 62, 63, 64, 65, 66, 67, 68, 69, 70, 71, 72, 73, 74, 75, 76, 77, 78, 79, 80, 81, 82, 83, 84, 85, 86, 87, 88, 89, 90, 91, 92, 93, 94, 95, 96, 97, 98, 99, or 100; from 42 to: 43, 44, 45, 46, 47, 48, 49, 50, 51, 52, 53, 54, 55, 56, 57, 58, 59, 60, 61, 62, 63, 64, 65, 66, 67, 68, 69, 70, 71, 72, 73, 74, 75, 76, 77, 78, 79, 80, 81, 82, 83, 84, 85, 86, 87, 88, 89, 90, 91, 92, 93, 94, 95, 96, 97, 98, 99, or 100; from 43 to: 44, 45, 46, 47, 48, 49, 50, 51, 52, 53, 54, 55, 56, 57, 58, 59, 60, 61, 62, 63, 64, 65, 66, 67, 68, 69, 70, 71, 72, 73, 74, 75, 76, 77, 78, 79, 80, 81, 82, 83, 84, 85, 86, 87, 88, 89, 90, 91, 92, 93, 94, 95, 96, 97, 98, 99, or 100; from 44 to: 45, 46, 47, 48, 49, 50, 51, 52, 53, 54, 55, 56, 57, 58, 59, 60, 61, 62, 63, 64, 65, 66, 67, 68, 69, 70, 71, 72, 73, 74, 75, 76, 77, 78, 79, 80, 81, 82, 83, 84, 85, 86, 87, 88, 89, 90, 91, 92, 93, 94, 95, 96, 97, 98, 99, or 100; from 45 to: 46, 47, 48, 49, 50, 51, 52, 53, 54, 55, 56, 57, 58, 59, 60, 61, 62, 63, 64, 65, 66, 67, 68, 69, 70, 71, 72, 73, 74, 75, 76, 77, 78, 79, 80, 81, 82, 83, 84, 85, 86, 87, 88, 89, 90, 91, 92, 93, 94, 95, 96, 97, 98, 99, or 100; from 46 to: 47, 48, 49, 50, 51, 52, 53, 54, 55, 56, 57, 58, 59, 60, 61, 62, 63, 64, 65, 66, 67, 68, 69, 70, 71, 72, 73, 74, 75, 76, 77, 78, 79, 80, 81, 82, 83, 84, 85, 86, 87, 88, 89, 90, 91, 92, 93, 94, 95, 96, 97, 98, 99, or 100; from 47 to: 48, 49, 50, 51, 52, 53, 54, 55, 56, 57, 58, 59, 60, 61, 62, 63, 64, 65, 66, 67, 68, 69, 70, 71, 72, 73, 74, 75, 76, 77, 78, 79, 80, 81, 82, 83, 84, 85, 86, 87, 88, 89, 90, 91, 92, 93, 94, 95, 96, 97, 98, 99, or 100; from 48 to: 49, 50, 51, 52, 53, 54, 55, 56, 57, 58, 59, 60, 61, 62, 63, 64, 65, 66, 67, 68, 69, 70, 71, 72, 73, 74, 75, 76, 77, 78, 79, 80, 81, 82, 83, 84, 85, 86, 87, 88, 89, 90, 91, 92, 93, 94, 95, 96, 97, 98, 99, or 100; from 49 to: 50, 51, 52, 53, 54, 55, 56, 57, 58, 59, 60, 61, 62, 63, 64, 65, 66, 67, 68, 69, 70, 71, 72, 73, 74, 75, 76, 77, 78, 79, 80, 81, 82, 83, 84, 85, 86, 87, 88, 89, 90, 91, 92, 93, 94, 95, 96, 97, 98, 99, or 100; from 50 to: 51, 52, 53, 54, 55, 56, 57, 58, 59, 60, 61, 62, 63, 64, 65, 66, 67, 68, 69, 70, 71, 72, 73, 74, 75, 76, 77, 78, 79, 80, 81, 82, 83, 84, 85, 86, 87, 88, 89, 90, 91, 92, 93, 94, 95, 96, 97, 98, 99, or 100; from 51 to: 52, 53, 54, 55, 56, 57, 58, 59, 60, 61, 62, 63, 64, 65, 66, 67, 68, 69, 70, 71, 72, 73, 74, 75, 76, 77, 78, 79, 80, 81, 82, 83, 84, 85, 86, 87, 88, 89, 90, 91, 92, 93, 94, 95, 96, 97, 98, 99, or 100; from 52 to: 53, 54, 55, 56, 57, 58, 59, 60, 61, 62, 63, 64, 65, 66, 67, 68, 69, 70, 71, 72, 73, 74, 75, 76, 77, 78, 79, 80, 81, 82, 83, 84, 85, 86, 87, 88, 89, 90, 91, 92, 93, 94, 95, 96, 97, 98, 99, or 100; from 53 to: 54, 55, 56, 57, 58, 59, 60, 61, 62, 63, 64, 65, 66, 67, 68, 69, 70, 71, 72, 73, 74, 75, 76, 77, 78, 79, 80, 81, 82, 83, 84, 85, 86, 87, 88, 89, 90, 91, 92, 93, 94, 95, 96, 97, 98, 99, or 100; from 54 to: 55, 56, 57, 58, 59, 60, 61, 62, 63, 64, 65, 66, 67, 68, 69, 70, 71, 72, 73, 74, 75, 76, 77, 78, 79, 80, 81, 82, 83, 84, 85, 86, 87, 88, 89, 90, 91, 92, 93, 94, 95, 96, 97, 98, 99, or 100; from 55 to: 56, 57, 58, 59, 60, 61, 62, 63, 64, 65, 66, 67, 68, 69, 70, 71, 72, 73, 74, 75, 76, 77, 78, 79, 80, 81, 82, 83, 84, 85, 86, 87, 88, 89, 90, 91, 92, 93, 94, 95, 96, 97, 98, 99, or 100; from 56 to: 57, 58, 59, 60, 61, 62, 63, 64, 65, 66, 67, 68, 69, 70, 71, 72, 73, 74, 75, 76, 77, 78, 79, 80, 81, 82, 83, 84, 85, 86, 87, 88, 89, 90, 91, 92, 93, 94, 95, 96, 97, 98, 99, or 100; from 57 to: 58, 59, 60, 61, 62, 63, 64, 65, 66, 67, 68, 69, 70, 71, 72, 73, 74, 75, 76, 77, 78, 79, 80, 81, 82, 83, 84, 85, 86, 87, 88, 89, 90, 91, 92, 93, 94, 95, 96, 97, 98, 99, or 100; from 58 to: 59, 60, 61, 62, 63, 64, 65, 66, 67, 68, 69, 70, 71, 72, 73, 74, 75, 76, 77, 78, 79, 80, 81, 82, 83, 84, 85, 86, 87, 88, 89, 90, 91, 92, 93, 94, 95, 96, 97, 98, 99, or 100; from 59 to: 60, 61, 62, 63, 64, 65, 66, 67, 68, 69, 70, 71, 72, 73, 74, 75, 76, 77, 78, 79, 80, 81, 82, 83, 84, 85, 86, 87, 88, 89, 90, 91, 92, 93, 94, 95, 96, 97, 98, 99, or 100; from 60 to: 61, 62, 63, 64, 65, 66, 67, 68, 69, 70, 71, 72, 73, 74, 75, 76, 77, 78, 79, 80, 81, 82, 83, 84, 85, 86, 87, 88, 89, 90, 91, 92, 93, 94, 95, 96, 97, 98, 99, or 100; from 61 to: 62, 63, 64, 65, 66, 67, 68, 69, 70, 71, 72, 73, 74, 75, 76, 77, 78, 79, 80, 81, 82, 83, 84, 85, 86, 87, 88, 89, 90, 91, 92, 93, 94, 95, 96, 97, 98, 99, or 100; from 62 to: 63, 64, 65, 66, 67, 68, 69, 70, 71, 72, 73, 74, 75, 76, 77, 78, 79, 80, 81, 82, 83, 84, 85, 86, 87, 88, 89, 90, 91, 92, 93, 94, 95, 96, 97, 98, 99, or 100; from 63 to: 64, 65, 66, 67, 68, 69, 70, 71, 72, 73, 74, 75, 76, 77, 78, 79, 80, 81, 82, 83, 84, 85, 86, 87, 88, 89, 90, 91, 92, 93, 94, 95, 96, 97, 98, 99, or 100; from 64 to: 65, 66, 67, 68, 69, 70, 71, 72, 73, 74, 75, 76, 77, 78, 79, 80, 81, 82, 83, 84, 85, 86, 87, 88, 89, 90, 91, 92, 93, 94, 95, 96, 97, 98, 99, or 100; from 65 to: 66, 67, 68, 69, 70, 71, 72, 73, 74, 75, 76, 77, 78, 79, 80, 81, 82, 83, 84, 85, 86, 87, 88, 89, 90, 91, 92, 93, 94, 95, 96, 97, 98, 99, or 100; from 66 to: 67, 68, 69, 70, 71, 72, 73, 74, 75, 76, 77, 78, 79, 80, 81, 82, 83, 84, 85, 86, 87, 88, 89, 90, 91, 92, 93, 94, 95, 96, 97, 98, 99, or 100; from 67 to: 68, 69, 70, 71, 72, 73, 74, 75, 76, 77, 78, 79, 80, 81, 82, 83, 84, 85, 86, 87, 88, 89, 90, 91, 92, 93, 94, 95, 96, 97, 98, 99, or 100; from 68 to: 69% 70, 71, 72, 73, 74, 75, 76, 77, 78, 79, 80, 81, 82, 83, 84, 85, 86, 87, 88, 89, 90, 91, 92, 93, 94, 95, 96, 97, 98, 99, or 100; from 69 to: 71, 72, 73, 74, 75, 76, 77, 78, 79, 80, 81, 82, 83, 84, 85, 86, 87, 88, 89, 90, 91, 92, 93, 94, 95, 96, 97, 98, 99, or 100; from 70 to: 71, 72, 73, 74, 75, 76, 77, 78, 79, 80, 81, 82, 83, 84, 85, 86, 87, 88, 89, 90, 91, 92, 93, 94, 95, 96, 97, 98, 99, or 100; from 71 to: 72, 73, 74, 75, 76, 77, 78, 79, 80, 81, 82, 83, 84, 85, 86, 87, 88, 89, 90, 91, 92, 93, 94, 95, 96, 97, 98, 99, or 100; from 72 to: 73, 74, 75, 76, 77, 78, 79, 80, 81, 82, 83, 84, 85, 86, 87, 88, 89, 90, 91, 92, 93, 94, 95, 96, 97, 98, 99, or 100; from 73 to: 74, 75, 76, 77, 78, 79, 80, 81, 82, 83, 84, 85, 86, 87, 88, 89, 90, 91, 92, 93, 94, 95, 96, 97, 98, 99, or 100; from 74 to: 75, 76, 77, 78, 79, 80, 81, 82, 83, 84, 85, 86, 87, 88, 89, 90, 91, 92, 93, 94, 95, 96, 97, 98, 99, or 100; or from 75 to: 76, 77, 78, 79, 80, 81, 82, 83, 84, 85, 86, 87, 88, 89, 90, 91, 92, 93, 94, 95, 96, 97, 98, 99, or 100 adenosine monophosphate residues.

[0204] Also contemplated and supported are combinations of “first segment of consecutive adenosine monophosphate residues” of “at least” and any of the above-noted “first segment of consecutive adenosine monophosphate residues” of “no more than” with the number of adenosine monophosphate residues of first segment of consecutive adenosine monophosphate residues provided in an Example of this document. Also contemplated and supported are combinations of the number of adenosine monophosphate residues of first segment of consecutive adenosine monophosphate residues of the Example section of this document to provide a range (i.e. the number of adenosine monophosphate residues of first segment of consecutive adenosine monophosphate residues of [the number of adenosine monophosphate residues of the first segment of consecutive adenosine monophosphate residues in RNA X₁ in the Examples] to [the number of adenosine monophosphate residues of the first segment of consecutive adenosine monophosphate residues in RNA X₂ in the Examples] wherein X, and X₂ represent any two exemplary RNA molecules of the Examples.

[0205] In some embodiments, the second segment of consecutive adenosine monophosphate residues comprises, consists of, consists essentially of, has, or is at least 20, 21, 22, 23, 24, 25, 26, 27, 28, 29, 30, 31, 32, 33, 34, 35, 36, 37, 38, 39, 40, 41, 42, 43, 44, 45, 46, 47, 48, 49, 50, 51, 52, 53, 54, 55, 56, 57, 58, 59, 60, 61, 62, 63, 64, 65, 66, 67, 68, 69, 70, 71, 72, 73, 74, 75, 76, 77, 78, 79, 80, 81, 82, 83, 84, 85, 86, 87, 88, 89, 90, 91, 92, 93, 94, 95, 96, 97, 98, 99, 100, 101, 102, 103,104,105,106,107, 108, 109, 110, 111, 112, 113, 114, 115, 116, 117, 118, 119, or 120 adenosine monophosphate residues.

[0206] In some embodiments, the second segment of consecutive adenosine monophosphate residues comprises, consists of, consists essentially of, has, or is no more than: 30, 31, 32, 33, 34, 35, 36, 37, 38, 39, 40, 41, 42, 43, 44, 45, 46, 47, 48, 49, 50, 51, 52, 53, 54, 55, 56, 57, 58, 59, 60, 61, 62, 63, 64, 65, 66, 67, 68, 69, 70, 71, 72, 73, 74, 75, 76, 77, 78, 79, 80, 81, 82, 83, 84, 85, 86, 87, 88, 89, 90, 91, 92, 93, 94, 95, 96, 97, 98, 99, 100, 101, 102, 103, 104,105,106,107,108,109,110,111,112,113, 114, 115, 116, 117, 118, 119, or 120 adenosine monophosphate residues.

[0207] Taking the above-noted embodiments into account, it is contemplated and supported that any of the above-noted “adenosine monophosphate residues” of “at least” and any of the above-noted “adenosine monophosphate residues” of “no more than” may be combined to provide an enclosed range (i.e. the second segment of consecutive adenosine monophosphate residues comprising from 60 to 90 consecutive adenosine monophosphate residues).

[0208] In some embodiments, the second segment of consecutive adenosine monophosphate residues comprises, consists of, consists essentially of, has, or is from 20 to: 21, 22, 23, 24, 25, 26, 27, 28, 29, 30, 31, 32, 33, 34, 35, 36, 37, 38, 39, 40, 41, 42, 43, 44, 45, 46, 47, 48, 49, 50, 51, 52, 53, 54, 55, 56, 57, 58, 59, 60, 61, 62, 63, 64, 65, 66, 67, 68, 69, 70, 71, 72, 73, 74, 75, 76, 77, 78, 79, 80, 81, 82, 83, 84, 85, 86, 87, 88, 89, 90, 91, 92, 93, 94, 95, 96, 97, 98, 99, or 100; from 21 to: 22, 23, 24, 25, 26, 27, 28, 29, 30, 31, 32, 33, 34, 35, 36, 37, 38, 39, 40, 41, 42, 43, 44, 45, 46, 47, 48, 49, 50, 51, 52, 53, 54, 55, 56, 57, 58, 59, 60, 61, 62, 63, 64, 65, 66, 67, 68, 69, 70, 71, 72, 73, 74, 75, 76, 77, 78, 79, 80, 81, 82, 83, 84, 85, 86, 87, 88, 89, 90, 91, 92, 93, 94, 95, 96, 97, 98, 99, or 100; from 22 to: 23, 24, 25, 26, 27, 28, 29, 30, 31, 32, 33, 34, 35, 36, 37, 38, 39, 40, 41, 42, 43, 44, 45, 46, 47, 48, 49, 50, 51, 52, 53, 54, 55, 56, 57, 58, 59, 60, 61, 62, 63, 64, 65, 66, 67, 68, 69, 70, 71, 72, 73, 74, 75, 76, 77, 78, 79, 80, 81, 82, 83, 84, 85, 86, 87, 88, 89, 90, 91, 92, 93, 94, 95, 96, 97, 98, 99, or 100; from 23 to: 24, 25, 26, 27, 28, 29, 30, 31, 32, 33, 34, 35, 36, 37, 38, 39, 40, 41, 42, 43, 44, 45, 46, 47, 48, 49, 50, 51, 52, 53, 54, 55, 56, 57, 58, 59, 60, 61, 62, 63, 64, 65, 66, 67, 68, 69, 70, 71, 72, 73, 74, 75, 76, 77, 78, 79, 80, 81, 82, 83, 84, 85, 86, 87, 88, 89, 90, 91, 92, 93, 94, 95, 96, 97, 98, 99, or 100; from 24 to: 25, 26, 27, 28, 29, 30, 31, 32, 33, 34, 35, 36, 37, 38, 39, 40, 41, 42, 43, 44, 45, 46, 47, 48, 49, 50, 51, 52, 53, 54, 55, 56, 57, 58, 59, 60, 61, 62, 63, 64, 65, 66, 67, 68, 69, 70, 71, 72, 73, 74, 75, 76, 77, 78, 79, 80, 81, 82, 83, 84, 85, 86, 87, 88, 89, 90, 91, 92, 93, 94, 95, 96, 97, 98, 99, or 100; from 25 to: 26, 27, 28, 29, 30, 31, 32, 33, 34, 35, 36, 37, 38, 39, 40, 41, 42, 43, 44, 45, 46, 47, 48, 49, 50, 51, 52, 53, 54, 55, 56, 57, 58, 59, 60, 61, 62, 63, 64, 65, 66, 67, 68, 69, 70, 71, 72, 73, 74, 75, 76, 77, 78, 79, 80, 81, 82, 83, 84, 85, 86, 87, 88, 89, 90, 91, 92, 93, 94, 95, 96, 97, 98, 99, or 100; from 26 to: 27, 28, 29, 30, 31, 32, 33, 34, 35, 36, 37, 38, 39, 40, 41, 42, 43, 44, 45, 46, 47, 48, 49, 50, 51, 52, 53, 54, 55, 56, 57, 58, 59, 60, 61, 62, 63, 64, 65, 66, 67, 68, 69, 70, 71, 72, 73, 74, 75, 76, 77, 78, 79, 80, 81, 82, 83, 84, 85, 86, 87, 88, 89, 90, 91, 92, 93, 94, 95, 96, 97, 98, 99, or 100; from 27 to: 28, 29, 30, 31, 32, 33, 34, 35, 36, 37, 38, 39, 40, 41, 42, 43, 44, 45, 46, 47, 48, 49, 50, 51, 52, 53, 54, 55, 56, 57, 58, 59, 60, 61, 62, 63, 64, 65, 66, 67, 68, 69, 70, 71, 72, 73, 74, 75, 76, 77, 78, 79, 80, 81, 82, 83, 84, 85, 86, 87, 88, 89, 90, 91, 92, 93, 94, 95, 96, 97, 98, 99, or 100; from 28 to: 29, 30, 31, 32, 33, 34, 35, 36, 37, 38, 39, 40, 41, 42, 43, 44, 45, 46, 47, 48, 49, 50, 51, 52, 53, 54, 55, 56, 57, 58, 59, 60, 61, 62, 63, 64, 65, 66, 67, 68, 69, 70, 71, 72, 73, 74, 75, 76, 77, 78, 79, 80, 81, 82, 83, 84, 85, 86, 87, 88, 89, 90, 91, 92, 93, 94, 95, 96, 97, 98, 99, or 100; from 29 to: 30, 31, 32, 33, 34, 35, 36, 37, 38, 39, 40, 41, 42, 43, 44, 45, 46, 47, 48, 49, 50, 51, 52, 53, 54, 55, 56, 57, 58, 59, 60, 61, 62, 63, 64, 65, 66, 67, 68, 69, 70, 71, 72, 73, 74, 75, 76, 77, 78, 79, 80, 81, 82, 83, 84, 85, 86, 87, 88, 89, 90, 91, 92, 93, 94, 95, 96, 97, 98, 99, or 100; from 30 to: 31, 32, 33, 34, 35, 36, 37, 38, 39, 40, 41, 42, 43, 44, 45, 46, 47, 48, 49, 50, 51, 52, 53, 54, 55, 56, 57, 58, 59, 60, 61, 62, 63, 64, 65, 66, 67, 68, 69, 70, 71, 72, 73, 74, 75, 76, 77, 78, 79, 80, 81, 82, 83, 84, 85, 86, 87, 88, 89, 90, 91, 92, 93, 94, 95, 96, 97, 98, 99, or 100; from 31 to: 32, 33, 34, 35, 36, 37, 38, 39, 40, 41, 42, 43, 44, 45, 46, 47, 48, 49, 50, 51, 52, 53, 54, 55, 56, 57, 58, 59, 60, 61, 62, 63, 64, 65, 66, 67, 68, 69, 70, 71, 72, 73, 74, 75, 76, 77, 78, 79, 80, 81, 82, 83, 84, 85, 86, 87, 88, 89, 90, 91, 92, 93, 94, 95, 96, 97, 98, 99, or 100; from 32 to: 33, 34, 35, 36, 37, 38, 39, 40, 41, 42, 43, 44, 45, 46, 47, 48, 49, 50, 51, 52, 53, 54, 55, 56, 57, 58, 59, 60, 61, 62, 63, 64, 65, 66, 67, 68, 69, 70, 71, 72, 73, 74, 75, 76, 77, 78, 79, 80, 81, 82, 83, 84, 85, 86, 87, 88, 89, 90, 91, 92, 93, 94, 95, 96, 97, 98, 99, or 100; from 33 to: 34, 35, 36, 37, 38, 39, 40, 41, 42, 43, 44, 45, 46, 47, 48, 49, 50, 51, 52, 53, 54, 55, 56, 57, 58, 59, 60, 61, 62, 63, 64, 65, 66, 67, 68, 69, 70, 71, 72, 73, 74, 75, 76, 77, 78, 79, 80, 81, 82, 83, 84, 85, 86, 87, 88, 89, 90, 91, 92, 93, 94, 95, 96, 97, 98, 99, or 100; from 34 to: 35, 36, 37, 38, 39,40, 41,42, 43, 44,45, 46, 47, 48, 49, 50, 51, 52, 53, 54, 55, 56, 57, 58, 59, 60, 61, 62, 63, 64, 65, 66, 67, 68, 69, 70, 71, 72, 73, 74, 75, 76, 77, 78, 79, 80, 81, 82, 83, 84, 85, 86, 87, 88, 89, 90, 91, 92, 93, 94, 95, 96, 97, 98, 99, or 100; from 35 to: 36, 37, 38, 39, 40, 41, 42, 43, 44, 45, 46, 47, 48, 49, 50, 51, 52, 53, 54, 55, 56, 57, 58, 59, 60, 61, 62, 63, 64, 65, 66, 67, 68, 69, 70, 71, 72, 73, 74, 75, 76, 77, 78, 79, 80, 81, 82, 83, 84, 85, 86, 87, 88, 89, 90, 91, 92, 93, 94, 95, 96, 97, 98, 99, or 100; from 36 to: 37, 38, 39, 40, 41, 42, 43, 44, 45, 46, 47, 48, 49, 50, 51, 52, 53, 54, 55, 56, 57, 58, 59, 60, 61, 62, 63, 64, 65, 66, 67, 68, 69, 70, 71, 72, 73, 74, 75, 76, 77, 78, 79, 80, 81, 82, 83, 84, 85, 86, 87, 88, 89, 90, 91, 92, 93, 94, 95, 96, 97, 98, 99, or 100; from 37 to: 38, 39, 40, 41, 42, 43, 44, 45, 46, 47, 48, 49, 50, 51, 52, 53, 54, 55, 56, 57, 58, 59, 60, 61, 62, 63, 64, 65, 66, 67, 68, 69, 70, 71, 72, 73, 74, 75, 76, 77, 78, 79, 80, 81, 82, 83, 84, 85, 86, 87, 88, 89, 90, 91, 92, 93, 94, 95, 96, 97, 98, 99, or 100; from 38 to: 39,40, 41,42, 43, 44,45, 46, 47, 48, 49, 50, 51, 52, 53, 54, 55, 56, 57, 58, 59, 60, 61, 62, 63, 64, 65, 66, 67, 68, 69, 70, 71, 72, 73, 74, 75, 76, 77, 78, 79, 80, 81, 82, 83, 84, 85, 86, 87, 88, 89, 90, 91, 92, 93, 94, 95, 96, 97, 98, 99, or 100; from 39 to: 40, 41, 42, 43, 44, 45, 46, 47, 48, 49, 50, 51, 52, 53, 54, 55, 56, 57, 58, 59, 60, 61, 62, 63, 64, 65, 66, 67, 68, 69, 70, 71, 72, 73, 74, 75, 76, 77, 78, 79, 80, 81, 82, 83, 84, 85, 86, 87, 88, 89, 90, 91, 92, 93, 94, 95, 96, 97, 98, 99, or 100; from 40 to: 41, 42, 43, 44, 45, 46, 47, 48, 49, 50, 51, 52, 53, 54, 55, 56, 57, 58, 59, 60, 61, 62, 63, 64, 65, 66, 67, 68, 69, 70, 71, 72, 73, 74, 75, 76, 77, 78, 79, 80, 81, 82, 83, 84, 85, 86, 87, 88, 89, 90, 91, 92, 93, 94, 95, 96, 97, 98, 99, or 100; from 41 to: 41, 42, 43, 44, 45, 46, 47, 48, 49, 50, 51, 52, 53, 54, 55, 56, 57, 58, 59, 60, 61, 62, 63, 64, 65, 66, 67, 68, 69, 70, 71, 72, 73, 74, 75, 76, 77, 78, 79, 80, 81, 82, 83, 84, 85, 86, 87, 88, 89, 90, 91, 92, 93, 94, 95, 96, 97, 98, 99, or 100; from 42 to: 43, 44, 45, 46, 47, 48, 49, 50, 51, 52, 53, 54, 55, 56, 57, 58, 59, 60, 61, 62, 63, 64, 65, 66, 67, 68, 69, 70, 71, 72, 73, 74, 75, 76, 77, 78, 79, 80, 81, 82, 83, 84, 85, 86, 87, 88, 89, 90, 91, 92, 93, 94, 95, 96, 97, 98, 99, or 100; from 43 to: 44, 45, 46, 47, 48, 49, 50, 51, 52, 53, 54, 55, 56, 57, 58, 59, 60, 61, 62, 63, 64, 65, 66, 67, 68, 69, 70, 71, 72, 73, 74, 75, 76, 77, 78, 79, 80, 81, 82, 83, 84, 85, 86, 87, 88, 89, 90, 91, 92, 93, 94, 95, 96, 97, 98, 99, or 100; from 44 to: 45, 46, 47, 48, 49, 50, 51, 52, 53, 54, 55, 56, 57, 58, 59, 60, 61, 62, 63, 64, 65, 66, 67, 68, 69, 70, 71, 72, 73, 74, 75, 76, 77, 78, 79, 80, 81, 82, 83, 84, 85, 86, 87, 88, 89, 90, 91, 92, 93, 94, 95, 96, 97, 98, 99, or 100; from 45 to: 46, 47, 48, 49, 50, 51, 52, 53, 54, 55, 56, 57, 58, 59, 60, 61, 62, 63, 64, 65, 66, 67, 68, 69, 70, 71, 72, 73, 74, 75, 76, 77, 78, 79, 80, 81, 82, 83, 84, 85, 86, 87, 88, 89, 90, 91, 92, 93, 94, 95, 96, 97, 98, 99, or 100; from 46 to: 47, 48, 49, 50, 51, 52, 53, 54, 55, 56, 57, 58, 59, 60, 61, 62, 63, 64, 65, 66, 67, 68, 69, 70, 71, 72, 73, 74, 75, 76, 77, 78, 79, 80, 81, 82, 83, 84, 85, 86, 87, 88, 89, 90, 91, 92, 93, 94, 95, 96, 97, 98, 99, or 100; from 47 to: 48, 49, 50, 51, 52, 53, 54, 55, 56, 57, 58, 59, 60, 61, 62, 63, 64, 65, 66, 67, 68, 69, 70, 71, 72, 73, 74, 75, 76, 77, 78, 79, 80, 81, 82, 83, 84, 85, 86, 87, 88, 89, 90, 91, 92, 93, 94, 95, 96, 97, 98, 99, or 100; from 48 to: 49, 50, 51, 52, 53, 54, 55, 56, 57, 58, 59, 60, 61, 62, 63, 64, 65, 66, 67, 68, 69, 70, 71, 72, 73, 74, 75, 76, 77, 78, 79, 80, 81, 82, 83, 84, 85, 86, 87, 88, 89, 90, 91, 92, 93, 94, 95, 96, 97, 98, 99, or 100; from 49 to: 50, 51, 52, 53, 54, 55, 56, 57, 58, 59, 60, 61, 62, 63, 64, 65, 66, 67, 68, 69, 70, 71, 72, 73, 74, 75, 76, 77, 78, 79, 80, 81, 82, 83, 84, 85, 86, 87, 88, 89, 90, 91, 92, 93, 94, 95, 96, 97, 98, 99, or 100; from 50 to: 51, 52, 53, 54, 55, 56, 57, 58, 59, 60, 61, 62, 63, 64, 65, 66, 67, 68, 69, 70, 71, 72, 73, 74, 75, 76, 77, 78, 79, 80, 81, 82, 83, 84, 85, 86, 87, 88, 89, 90, 91, 92, 93, 94, 95, 96, 97, 98, 99, or 100; from 51 to: 52, 53, 54, 55, 56, 57, 58, 59, 60, 61, 62, 63, 64, 65, 66, 67, 68, 69, 70, 71, 72, 73, 74, 75, 76, 77, 78, 79, 80, 81, 82, 83, 84, 85, 86, 87, 88, 89, 90, 91, 92, 93, 94, 95, 96, 97, 98, 99, or 100; from 52 to: 53, 54, 55, 56, 57, 58, 59, 60, 61, 62, 63, 64, 65, 66, 67, 68, 69, 70, 71, 72, 73, 74, 75, 76, 77, 78, 79, 80, 81, 82, 83, 84, 85, 86, 87, 88, 89, 90, 91, 92, 93, 94, 95, 96, 97, 98, 99, or 100; from 53 to: 54, 55, 56, 57, 58, 59, 60, 61, 62, 63, 64, 65, 66, 67, 68, 69, 70, 71, 72, 73, 74, 75, 76, 77, 78, 79, 80, 81, 82, 83, 84, 85, 86, 87, 88, 89, 90, 91, 92, 93, 94, 95, 96, 97, 98, 99, or 100; from 54 to: 55, 56, 57, 58, 59, 60, 61, 62, 63, 64, 65, 66, 67, 68, 69, 70, 71, 72, 73, 74, 75, 76, 77, 78, 79, 80, 81, 82, 83, 84, 85, 86, 87, 88, 89, 90, 91, 92, 93, 94, 95, 96, 97, 98, 99, or 100; from 55 to: 56, 57, 58, 59, 60, 61, 62, 63, 64, 65, 66, 67, 68, 69, 70, 71, 72, 73, 74, 75, 76, 77, 78, 79, 80, 81, 82, 83, 84, 85, 86, 87, 88, 89, 90, 91, 92, 93, 94, 95, 96, 97, 98, 99, or 100; from 56 to: 57, 58, 59, 60, 61, 62, 63, 64, 65, 66, 67, 68, 69, 70, 71, 72, 73, 74, 75, 76, 77, 78, 79, 80, 81, 82, 83, 84, 85, 86, 87, 88, 89, 90, 91, 92, 93, 94, 95, 96, 97, 98, 99, or 100; from 57 to: 58, 59, 60, 61, 62, 63, 64, 65, 66, 67, 68, 69, 70, 71, 72, 73, 74, 75, 76, 77, 78, 79, 80, 81, 82, 83, 84, 85, 86, 87, 88, 89, 90, 91, 92, 93, 94, 95, 96, 97, 98, 99, or 100; from 58 to: 59, 60, 61, 62, 63, 64, 65, 66, 67, 68, 69, 70, 71, 72, 73, 74, 75, 76, 77, 78, 79, 80, 81, 82, 83, 84, 85, 86, 87, 88, 89, 90, 91, 92, 93, 94, 95, 96, 97, 98, 99, or 100; from 59 to: 60, 61, 62, 63, 64, 65, 66, 67, 68, 69, 70, 71, 72, 73, 74, 75, 76, 77, 78, 79, 80, 81, 82, 83, 84, 85, 86, 87, 88, 89, 90, 91, 92, 93, 94, 95, 96, 97, 98, 99, or 100; from 60 to: 61, 62, 63, 64, 65, 66, 67, 68, 69, 70, 71, 72, 73, 74, 75, 76, 77, 78, 79, 80, 81, 82, 83, 84, 85, 86, 87, 88, 89, 90, 91, 92, 93, 94, 95, 96, 97, 98, 99, or 100; from 61 to: 62, 63, 64, 65, 66, 67, 68, 69, 70, 71, 72, 73, 74, 75, 76, 77, 78, 79, 80, 81, 82, 83, 84, 85, 86, 87, 88, 89, 90, 91, 92, 93, 94, 95, 96, 97, 98, 99, or 100; from 62 to: 63, 64, 65, 66, 67, 68, 69, 70, 71, 72, 73, 74, 75, 76, 77, 78, 79, 80, 81, 82, 83, 84, 85, 86, 87, 88, 89, 90, 91, 92, 93, 94, 95, 96, 97, 98, 99, or 100; from 63 to: 64, 65, 66, 67, 68, 69, 70, 71, 72, 73, 74, 75, 76, 77, 78, 79, 80, 81, 82, 83, 84, 85, 86, 87, 88, 89, 90, 91, 92, 93, 94, 95, 96, 97, 98, 99, or 100; from 64 to: 65, 66, 67, 68, 69, 70, 71, 72, 73, 74, 75, 76, 77, 78, 79, 80, 81, 82, 83, 84, 85, 86, 87, 88, 89, 90, 91, 92, 93, 94, 95, 96, 97, 98, 99, or 100; from 65 to: 66, 67, 68, 69, 70, 71, 72, 73, 74, 75, 76, 77, 78, 79, 80, 81, 82, 83, 84, 85, 86, 87, 88, 89, 90, 91, 92, 93, 94, 95, 96, 97, 98, 99, or 100; from 66 to: 67, 68, 69, 70, 71, 72, 73, 74, 75, 76, 77, 78, 79, 80, 81, 82, 83, 84, 85, 86, 87, 88, 89, 90, 91, 92, 93, 94, 95, 96, 97, 98, 99, or 100; from 67 to: 68, 69, 70, 71, 72, 73, 74, 75, 76, 77, 78, 79, 80, 81, 82, 83, 84, 85, 86, 87, 88, 89, 90, 91, 92, 93, 94, 95, 96, 97, 98, 99, or 100; from 68 to: 69% 70, 71, 72, 73, 74, 75, 76, 77, 78, 79, 80, 81, 82, 83, 84, 85, 86, 87, 88, 89, 90, 91, 92, 93, 94, 95, 96, 97, 98, 99, or 100; from 69 to: 71, 72, 73, 74, 75, 76, 77, 78, 79, 80, 81, 82, 83, 84, 85, 86, 87, 88, 89, 90, 91, 92, 93, 94, 95, 96, 97, 98, 99, or 100; from 70 to: 71, 72, 73, 74, 75, 76, 77, 78, 79, 80, 81, 82, 83, 84, 85, 86, 87, 88, 89, 90, 91, 92, 93, 94, 95, 96, 97, 98, 99, or 100; from 71 to: 72, 73, 74, 75, 76, 77, 78, 79, 80, 81, 82, 83, 84, 85, 86, 87, 88, 89, 90, 91, 92, 93, 94, 95, 96, 97, 98, 99, or 100; from 72 to: 73, 74, 75, 76, 77, 78, 79, 80, 81, 82, 83, 84, 85, 86, 87, 88, 89, 90, 91, 92, 93, 94, 95, 96, 97, 98, 99, or 100; from 73 to: 74, 75, 76, 77, 78, 79, 80, 81, 82, 83, 84, 85, 86, 87, 88, 89, 90, 91, 92, 93, 94, 95, 96, 97, 98, 99, or 100; from 74 to: 75, 76, 77, 78, 79, 80, 81, 82, 83, 84, 85, 86, 87, 88, 89, 90, 91, 92, 93, 94, 95, 96, 97, 98, 99, or 100; or from 75 to: 76, 77, 78, 79, 80, 81, 82, 83, 84, 85, 86, 87, 88, 89, 90, 91, 92, 93, 94, 95, 96, 97, 98, 99, or 100 adenosine monophosphate residues.

### 5′ Capping

[0209] In some embodiments, the RNA further comprises a 5′ cap. In some embodiments, the RNA further comprises a 5′ nucleoside (e.g. a 7-methylguanosine or a modified 7-methylguanosine (e.g. 3′-methyl, 7′-methylguanosine (a 3′-O-me, 7-me-G))), a 5′ first ribonucleoside, an optional 5′ second ribonucleoside, and an optional tri-phosphate bridge. In some embodiments, the 5′ nucleoside (e.g. a 7-methylguanosine or a modified 7-methylguanosine (e.g. 3′-methyl, 7′-methylguanosine (a 3′-O-me, 7-me-G))) is linked directly or indirectly 5′-to-5′ to the 5′ first ribonucleoside. In some embodiments, the 5′ nucleoside (e.g. a 7-methylguanosine or a modified 7-methylguanosine (e.g. 3′-methyl, 7′-methylguanosine (a 3′-O-me, 7-me-G))) is linked 5′-to-5′ to the 5′ first ribonucleoside by the triphosphate bridge. In some embodiments, the 5′ first ribonucleoside comprises a 2′-methylated ribose (2′-O-Me) (i.e. a cap-1 or cap-2). In some embodiments, the 5′ second ribonucleoside is bound to the 3′ end of the 5′ first ribonucleoside. In some embodiments, the 5′ second ribonucleoside comprises a 2′-methylated ribose (2′-O-Me) (i.e. a cap-2). In some embodiments, the 5′ first ribonucleoside comprises a 2′-methylated ribose (2′-O-Me) and the 5′ second ribonucleoside comprises a 2′-methylated ribose (2′-O-Me) (i.e. a cap-2). A 5′ cap comprises a guanosine connected to the RNA via a 5′ to 5′ triphosphate linkage by mRNA guanylyltransferase, and wherein the guanine of said guanosine is methylated at its 7 position. In this context and in some embodiments, a 5′ to 5′ triphosphate linkage occurs when the 5′ end of the ribose of said guanosine is linked to the 5′ end of the ribose of the RNA via a triphophosphate group by mRNA guanylyltransferase. In some embodiments, thereafter, the guanine of said guanosine is methylated at its 7 position by (guanine-N7-)-methyltransferase. In some embodiments, the addition of the 7-methylguanosine 5′-to-5′ to the 5′ first ribonucleoside occurs at once, without addition of the 7-guanosine and further methylation thereof to obtain 7-methylguanosine (i.e. CLEANCAP®). In some embodiments, the addition of the 7-methylguanosine 5′-to-5′ to the 5′ first ribonucleoside and the addition of the 5′ first ribonucleoside comprising a 2′-methlyated ribose or 5′ second ribonucleoside comprising a 2′-methylated ribose occurs at once (i.e. CLEANCAP®). In some embodiments, the cap structure is preformed (i.e. as cap-1, cap-2, or cap-0, with or without the addition of the 7 methyl-group on the 5′ guanosine/7-methylguanosine) and added to the recombinant RNA molecule (i.e. by ligation). In some embodiments, the preformed cap structure is added with a 5′-AG-3′ initiating sequence as described in the CLEANCAP® AG product insert (Trilink catalog number N-7113), which is incorporated by reference).

[0210] Without further methylation, a 7-methylguanosine bound 5′-to-5′ to the 5′ first ribonucleoside is known as cap-0 and is expressed as 5′(m7Gp)(ppN)[pN]_{N}, wherein the former “N” indicates the first (5′) nucleobase of the RNA, the “pN” indicates a further nucleotide in the RNA, and the addition of “[..]_{N}” in “[pN]_{N}” indicates the repeating polymeric structure of the RNA and thereby collectively each sequentially adjacent nucleotide in the RNA.

[0211] An additional oxygen-linked methylation by a 2′-O-methyltransferase to the 2′ carbon of the ribose of the nucleoside of the RNA immediately adjacent to said 7-methylguanosine (i.e. the 5′ first ribonucleoside) results in a cap-1 structure, which is expressed as 5′(m7Gp)(ppm2N)[pN]_{N}, wherein the addition of the “m2” indicates the oxygen-linked methylation of the 2′ carbon of the ribose of the nucleoside immediately adjacent (via the triphosphate linkage) to said 7-methylguanosine. And further still, an additional methylation to the 5′ second ribonucleoside (i.e the next (3′) nucleoside immediately adjacent to the 5′ first nucleoside methylated in cap-1) results in a cap-2 structure, which is expressed as 5′(m7Gp)(ppm2N)(m2pN)[pN]n, wherein the addition of the latter “m2” indicates the methylation of the nucleotide immediately adjacent to the nucleotide methylated in cap-1. This cap-2 methylation is also to the 2′ carbon of the ribose of that immediately adjacent nucleotide (i.e. 2′-O-Me). In some embodiments, the 5′ cap is a cap-0, a cap-1, or a cap-2. In some embodiments, the 5′ cap is a cap-0. In some embodiments, the 5′ cap is a cap-1. In some embodiments, the 5′ cap is a cap-2.

[0212] In some embodiments, the 5′ first ribonucleoside or the 5′ second ribonucleoside is exogenously added to the RNA. In some embodiments, the 5′ first ribonucleoside or the 5′ second ribonucleoside is native to the RNA (i.e. if the native sequence is 5′-UUAAT-3′, then the addition of the m7Gp would result in 5′-m7Gp(ppUUAAT-3′ when there is a triphosphate bride; if the native sequence is the same, then the cap-1 structure would result in 5′-(m7Gp)(ppm2U)UAAT-3′ and the cap-2 structure being 5′-(m7Gp)(ppm2U)(m2U)AAT-3′).

[0213] Kits providing all of the materials for a 5′ cap, whether it is cap-1 or cap-2, and supplemental kits adding cap-1 and cap-2 capacity to a cap-0 kit can be used. The methods for 5′ capping can be carried out according to the manufacturer's instructions.

### Modified Nucleotides

[0214] In some embodiments, the percentage of uridines or thymidines substituted with a uridine-substitutable modified nucleotide or a thymidine-substitutable modified nucleotide are at least: 10%, 11%, 12%, 13%, 14%, 15%, 16%, 17%, 18%, 19%, 20%, 21%, 22%, 23%, 24%, 25%, 26%, 27%, 28%, 29%, 30%, 31%, 32%, 33%, 34%, 35%, 36%, 37%, 38%, 39%, 40%, 41%, 42%, 43%, 44%, 45%, 46%, 47%, 48%, 49%, 50%, 51%, 52%, 53%, 54%, 55%, 56%, 57%, 58%, 59%, 60%, 61%, 62%, 63%, 64%, 65%, 66%, 67%, 68%, 69%, 70%, 71%, 72%, 73%, 74%, 75%, 76%, 77%, 78%, 79%, 80%, 81%, 82%, 83%, 84%, 85%, 86%, 87%, 88%, 89%, 90%, 91%, 92%, 93%, 94%, 95%, 96%, 97%, 98%, 99%, or 100%. In some embodiments, the percentage of uridines or thymidines substituted with a uridine-substitutable modified nucleotide or a thymidine-substitutable modified nucleotide are no more than: 80%, 79%, 78%, 77%, 76%, 75%, 74%, 73%, 72%, 71%, 70%, 69%, 68%, 67%, 66%, 65%, 64%, 63%, 62%, 61%, 60%, 59%, 58%, 57%, 56%, 55%, 54%, 53%, 52%, 51%, 50%, 49%, 48%, 47%, 46%, 45%, 44%, 43%, 42%, 41%, 40%, 39%, 38%, 37%, 36%, 35%, 34%, 33%, 32%, 31%, 30%, 29%, 28%, 27%, 26%, 25%, 24%, 23%, 22%, 21%, 20%, 19%, 18%, 17%, 16%, or 15%. Taking the above-noted embodiments into account, it is contemplated and supported that any of the above-noted “%” of “at least” and any of the above-noted “%” of “no more than” may be combined to provide an enclosed range (i.e. the percentage of uridines or thymidines substituted with a uridine-substitutable modified nucleotide or a thymidine-substitutable modified nucleotide are from 25% to 75%). In some embodiments, the percentage of uridines or thymidines substituted with a uridine-substitutable modified nucleotide or a thymidine-substitutable modified nucleotide are from 20% to: 21%, 22%, 23%, 24%, 25%, 26%, 27%, 28%, 29%, 30%, 31%, 32%, 33%, 34%, 35%, 36%, 37%, 38%, 39%, 40%, 41%, 42%, 43%, 44%, 45%, 46%, 47%, 48%, 49%, 50%, 51%, 52%, 53%, 54%, 55%, 56%, 57%, 58%, 59%, 60%, 61%, 62%, 63%, 64%, 65%, 66%, 67%, 68%, 69%, 70%, 71%, 72%, 73%, 74%, 75%, 76%, 77%, 78%, 79%, 80%, 81%, 82%, 83%, 84%, 85%, 86%, 87%, 88%, 89%, 90%, 91%, 92%, 93%, 94%, 95%, 96%, 97%, 98%, 99%, or 100%; from 21% to: 22%, 23%, 24%, 25%, 26%, 27%, 28%, 29%, 30%, 31%, 32%, 33%, 34%, 35%, 36%, 37%, 38%, 39%, 40%, 41%, 42%, 43%, 44%, 45%, 46%, 47%, 48%, 49%, 50%, 51%, 52%, 53%, 54%, 55%, 56%, 57%, 58%, 59%, 60%, 61%, 62%, 63%, 64%, 65%, 66%, 67%, 68%, 69%, 70%, 71%, 72%, 73%, 74%, 75%, 76%, 77%, 78%, 79%, 80%, 81%, 82%, 83%, 84%, 85%, 86%, 87%, 88%, 89%, 90%, 91%, 92%, 93%, 94%, 95%, 96%, 97%, 98%, 99%, or 100%; from 22% to: 23%, 24%, 25%, 26%, 27%, 28%, 29%, 30%, 31%, 32%, 33%, 34%, 35%, 36%, 37%, 38%, 39%, 40%, 41%, 42%, 43%, 44%, 45%, 46%, 47%, 48%, 49%, 50%, 51%, 52%, 53%, 54%, 55%, 56%, 57%, 58%, 59%, 60%, 61%, 62%, 63%, 64%, 65%, 66%, 67%, 68%, 69%, 70%, 71%, 72%, 73%, 74%, 75%, 76%, 77%, 78%, 79%, 80%, 81%, 82%, 83%, 84%, 85%, 86%, 87%, 88%, 89%, 90%, 91%, 92%, 93%, 94%, 95%, 96%, 97%, 98%, 99%, or 100%; from 23% to: 24%, 25%, 26%, 27%, 28%, 29%, 30%, 31%, 32%, 33%, 34%, 35%, 36%, 37%, 38%, 39%, 40%, 41%, 42%, 43%, 44%, 45%, 46%, 47%, 48%, 49%, 50%, 51%, 52%, 53%, 54%, 55%, 56%, 57%, 58%, 59%, 60%, 61%, 62%, 63%, 64%, 65%, 66%, 67%, 68%, 69%, 70%, 71%, 72%, 73%, 74%, 75%, 76%, 77%, 78%, 79%, 80%, 81%, 82%, 83%, 84%, 85%, 86%, 87%, 88%, 89%, 90%, 91%, 92%, 93%, 94%, 95%, 96%, 97%, 98%, 99%, or 100%; from 24% to: 25%, 26%, 27%, 28%, 29%, 30%, 31%, 32%, 33%, 34%, 35%, 36%, 37%, 38%, 39%, 40%, 41%, 42%, 43%, 44%, 45%, 46%, 47%, 48%, 49%, 50%, 51%, 52%, 53%, 54%, 55%, 56%, 57%, 58%, 59%, 60%, 61%, 62%, 63%, 64%, 65%, 66%, 67%, 68%, 69%, 70%, 71%, 72%, 73%, 74%, 75%, 76%, 77%, 78%, 79%, 80%, 81%, 82%, 83%, 84%, 85%, 86%, 87%, 88%, 89%, 90%, 91%, 92%, 93%, 94%, 95%, 96%, 97%, 98%, 99%, or 100%; from 25% to: 26%, 27%, 28%, 29%, 30%, 31%, 32%, 33%, 34%, 35%, 36%, 37%, 38%, 39%, 40%, 41%, 42%, 43%, 44%, 45%, 46%, 47%, 48%, 49%, 50%, 51%, 52%, 53%, 54%, 55%, 56%, 57%, 58%, 59%, 60%, 61%, 62%, 63%, 64%, 65%, 66%, 67%, 68%, 69%, 70%, 71%, 72%, 73%, 74%, 75%, 76%, 77%, 78%, 79%, 80%, 81%, 82%, 83%, 84%, 85%, 86%, 87%, 88%, 89%, 90%, 91%, 92%, 93%, 94%, 95%, 96%, 97%, 98%, 99%, or 100%; from 26% to: 27%, 28%, 29%, 30%, 31%, 32%, 33%, 34%, 35%, 36%, 37%, 38%, 39%, 40%, 41%, 42%, 43%, 44%, 45%, 46%, 47%, 48%, 49%, 50%, 51%, 52%, 53%, 54%, 55%, 56%, 57%, 58%, 59%, 60%, 61%, 62%, 63%, 64%, 65%, 66%, 67%, 68%, 69%, 70%, 71%, 72%, 73%, 74%, 75%, 76%, 77%, 78%, 79%, 80%, 81%, 82%, 83%, 84%, 85%, 86%, 87%, 88%, 89%, 90%, 91%, 92%, 93%, 94%, 95%, 96%, 97%, 98%, 99%, or 100%; from 27% to: 28%,29%,30%,31%,32%,33%,34%,35%,36%,37%,38%,39%,40%,41%, 42%, 43%, 44%, 45%, 46%, 47%, 48%, 49%, 50%, 51%, 52%, 53%, 54%, 55%, 56%, 57%, 58%, 59%, 60%, 61%, 62%, 63%, 64%, 65%, 66%, 67%, 68%, 69%, 70%, 71%, 72%, 73%, 74%, 75%, 76%, 77%, 78%, 79%, 80%, 81%, 82%, 83%, 84%, 85%, 86%, 87%, 88%, 89%, 90%, 91%, 92%, 93%, 94%, 95%, 96%, 97%, 98%, 99%, or 100%; from 28% to: 29%, 30%, 31%, 32%, 33%, 34%, 35%, 36%, 37%, 38%, 39%, 40%, 41%, 42%, 43%, 44%, 45%, 46%, 47%, 48%, 49%, 50%, 51%, 52%, 53%, 54%, 55%, 56%, 57%, 58%, 59%, 60%, 61%, 62%, 63%, 64%, 65%, 66%, 67%, 68%, 69%, 70%, 71%, 72%, 73%, 74%, 75%, 76%, 77%, 78%, 79%, 80%, 81%, 82%, 83%, 84%, 85%, 86%, 87%, 88%, 89%, 90%, 91%, 92%, 93%, 94%, 95%, 96%, 97%, 98%, 99%, or 100%; from 29% to: 30%, 31%, 32%, 33%, 34%, 35%, 36%, 37%, 38%, 39%, 40%, 41%, 42%, 43%, 44%, 45%, 46%, 47%, 48%, 49%, 50%, 51%, 52%, 53%, 54%, 55%, 56%, 57%, 58%, 59%, 60%, 61%, 62%, 63%, 64%, 65%, 66%, 67%, 68%, 69%, 70%, 71%, 72%, 73%, 74%, 75%, 76%, 77%, 78%, 79%, 80%, 81%, 82%, 83%, 84%, 85%, 86%, 87%, 88%, 89%, 90%, 91%, 92%, 93%, 94%, 95%, 96%, 97%, 98%, 99%, or 100%; from 30% to: 31%, 32%, 33%, 34%, 35%, 36%, 37%, 38%, 39%, 40%, 41%, 42%, 43%, 44%, 45%, 46%, 47%, 48%, 49%, 50%, 51%, 52%, 53%, 54%, 55%, 56%, 57%, 58%, 59%, 60%, 61%, 62%, 63%, 64%, 65%, 66%, 67%, 68%, 69%, 70%, 71%, 72%, 73%, 74%, 75%, 76%, 77%, 78%, 79%, 80%, 81%, 82%, 83%, 84%, 85%, 86%, 87%, 88%, 89%, 90%, 91%, 92%, 93%, 94%, 95%, 96%, 97%, 98%, 99%, or 100%; from 31% to: 32%, 33%, 34%, 35%, 36%, 37%, 38%, 39%, 40%, 41%, 42%, 43%, 44%, 45%, 46%, 47%, 48%, 49%, 50%, 51%, 52%, 53%, 54%, 55%, 56%, 57%, 58%, 59%, 60%, 61%, 62%, 63%, 64%, 65%, 66%, 67%, 68%, 69%, 70%, 71%, 72%, 73%, 74%, 75%, 76%, 77%, 78%, 79%, 80%, 81%, 82%, 83%, 84%, 85%, 86%, 87%, 88%, 89%, 90%, 91%, 92%, 93%, 94%, 95%, 96%, 97%, 98%, 99%, or 100%; from 32% to: 33%, 34%, 35%, 36%, 37%, 38%, 39%, 40%, 41%, 42%, 43%, 44%, 45%, 46%, 47%, 48%, 49%, 50%, 51%, 52%, 53%, 54%, 55%, 56%, 57%, 58%, 59%, 60%, 61%, 62%, 63%, 64%, 65%, 66%, 67%, 68%, 69%, 70%, 71%, 72%, 73%, 74%, 75%, 76%, 77%, 78%, 79%, 80%, 81%, 82%, 83%, 84%, 85%, 86%, 87%, 88%, 89%, 90%, 91%, 92%, 93%, 94%, 95%, 96%, 97%, 98%, 99%, or 100%; from 33% to: 34%, 35%, 36%, 37%, 38%, 39%, 40%, 41%, 42%, 43%, 44%, 45%, 46%, 47%, 48%, 49%, 50%, 51%, 52%, 53%, 54%, 55%, 56%, 57%, 58%, 59%, 60%, 61%, 62%, 63%, 64%, 65%, 66%, 67%, 68%, 69%, 70%, 71%, 72%, 73%, 74%, 75%, 76%, 77%, 78%, 79%, 80%, 81%, 82%, 83%, 84%, 85%, 86%, 87%, 88%, 89%, 90%, 91%, 92%, 93%, 94%, 95%, 96%, 97%, 98%, 99%, or 100%; from 34% to: 35%, 36%, 37%, 38%, 39%, 40%, 41%, 42%, 43%, 44%, 45%, 46%, 47%, 48%, 49%, 50%, 51%, 52%, 53%, 54%, 55%, 56%, 57%, 58%, 59%, 60%, 61%, 62%, 63%, 64%, 65%, 66%, 67%, 68%, 69%, 70%, 71%, 72%, 73%, 74%, 75%, 76%, 77%, 78%, 79%, 80%, 81%, 82%, 83%, 84%, 85%, 86%, 87%, 88%, 89%, 90%, 91%, 92%, 93%, 94%, 95%, 96%, 97%, 98%, 99%, or 100%; from 35% to: 36%, 37%, 38%, 39%, 40%, 41%, 42%, 43%, 44%, 45%, 46%, 47%, 48%, 49%, 50%, 51%, 52%, 53%, 54%, 55%, 56%, 57%, 58%, 59%, 60%, 61%, 62%, 63%, 64%, 65%, 66%, 67%, 68%, 69%, 70%, 71%, 72%, 73%, 74%, 75%, 76%, 77%, 78%, 79%, 80%, 81%, 82%, 83%, 84%, 85%, 86%, 87%, 88%, 89%, 90%, 91%, 92%, 93%, 94%, 95%, 96%, 97%, 98%, 99%, or 100%; from 36% to: 37%, 38%, 39%, 40%, 41%, 42%, 43%, 44%, 45%, 46%, 47%, 48%, 49%, 50%, 51%, 52%, 53%, 54%, 55%, 56%, 57%, 58%, 59%, 60%, 61%, 62%, 63%, 64%, 65%, 66%, 67%, 68%, 69%, 70%, 71%, 72%, 73%, 74%, 75%, 76%, 77%, 78%, 79%, 80%, 81%, 82%, 83%, 84%, 85%, 86%, 87%, 88%, 89%, 90%, 91%, 92%, 93%, 94%, 95%, 96%, 97%, 98%, 99%, or 100%; from 37% to: 38%, 39%, 40%, 41%, 42%, 43%, 44%, 45%, 46%, 47%, 48%, 49%, 50%, 51%, 52%, 53%, 54%, 55%, 56%, 57%, 58%, 59%, 60%, 61%, 62%, 63%, 64%, 65%, 66%, 67%, 68%, 69%, 70%, 71%, 72%, 73%, 74%, 75%, 76%, 77%, 78%, 79%, 80%, 81%, 82%, 83%, 84%, 85%, 86%, 87%, 88%, 89%, 90%, 91%, 92%, 93%, 94%, 95%, 96%, 97%, 98%, 99%, or 100%; from 38% to: 39%, 40%, 41%, 42%, 43%, 44%, 45%, 46%, 47%, 48%, 49%, 50%, 51%, 52%, 53%, 54%, 55%, 56%, 57%, 58%, 59%, 60%, 61%, 62%, 63%, 64%, 65%, 66%, 67%, 68%, 69%, 70%, 71%, 72%, 73%, 74%, 75%, 76%, 77%, 78%, 79%, 80%, 81%, 82%, 83%, 84%, 85%, 86%, 87%, 88%, 89%, 90%, 91%, 92%, 93%, 94%, 95%, 96%, 97%, 98%, 99%, or 100%; from 39% to: 40%, 41%, 42%, 43%, 44%, 45%, 46%, 47%, 48%, 49%, 50%, 51%, 52%, 53%, 54%, 55%, 56%, 57%, 58%, 59%, 60%, 61%, 62%, 63%, 64%, 65%, 66%, 67%, 68%, 69%, 70%, 71%, 72%, 73%, 74%, 75%, 76%, 77%, 78%, 79%, 80%, 81%, 82%, 83%, 84%, 85%, 86%, 87%, 88%, 89%, 90%, 91%, 92%, 93%, 94%, 95%, 96%, 97%, 98%, 99%, or 100%; from 40% to: 41%, 42%, 43%, 44%, 45%, 46%, 47%, 48%, 49%, 50%, 51%, 52%, 53%, 54%, 55%, 56%, 57%, 58%, 59%, 60%, 61%, 62%, 63%, 64%, 65%, 66%, 67%, 68%, 69%, 70%, 71%, 72%, 73%, 74%, 75%, 76%, 77%, 78%, 79%, 80%, 81%, 82%, 83%, 84%, 85%, 86%, 87%, 88%, 89%, 90%, 91%, 92%, 93%, 94%, 95%, 96%, 97%, 98%, 99%, or 100%; from 41% to: 41%, 42%, 43%, 44%, 45%, 46%, 47%, 48%, 49%, 50%, 51%, 52%, 53%, 54%, 55%, 56%, 57%, 58%, 59%, 60%, 61%, 62%, 63%, 64%, 65%, 66%, 67%, 68%, 69%, 70%, 71%, 72%, 73%, 74%, 75%, 76%, 77%, 78%, 79%, 80%, 81%, 82%, 83%, 84%, 85%, 86%, 87%, 88%, 89%, 90%, 91%, 92%, 93%, 94%, 95%, 96%, 97%, 98%, 99%, or 100%; from 42% to: 43%, 44%, 45%, 46%, 47%, 48%, 49%, 50%, 51%, 52%, 53%, 54%, 55%, 56%, 57%, 58%, 59%, 60%, 61%, 62%, 63%, 64%, 65%, 66%, 67%, 68%, 69%, 70%, 71%, 72%, 73%, 74%, 75%, 76%, 77%, 78%, 79%, 80%, 81%, 82%, 83%, 84%, 85%, 86%, 87%, 88%, 89%, 90%, 91%, 92%, 93%, 94%, 95%, 96%, 97%, 98%, 99%, or 100%; from 43% to: 44%, 45%, 46%, 47%, 48%, 49%, 50%, 51%, 52%, 53%, 54%, 55%, 56%, 57%, 58%, 59%, 60%, 61%, 62%, 63%, 64%, 65%, 66%, 67%, 68%, 69%, 70%, 71%, 72%, 73%, 74%, 75%, 76%, 77%, 78%, 79%, 80%, 81%, 82%, 83%, 84%, 85%, 86%, 87%, 88%, 89%, 90%, 91%, 92%, 93%, 94%, 95%, 96%, 97%, 98%, 99%, or 100%; from 44% to: 45%, 46%, 47%, 48%, 49%, 50%, 51%, 52%, 53%, 54%, 55%, 56%, 57%, 58%, 59%, 60%, 61%, 62%, 63%, 64%, 65%, 66%, 67%, 68%, 69%, 70%, 71%, 72%, 73%, 74%, 75%, 76%, 77%, 78%, 79%, 80%, 81%, 82%, 83%, 84%, 85%, 86%, 87%, 88%, 89%, 90%, 91%, 92%, 93%, 94%, 95%, 96%, 97%, 98%, 99%, or 100%; from 45% to: 46%, 47%, 48%, 49%, 50%, 51%, 52%, 53%, 54%, 55%, 56%, 57%, 58%, 59%, 60%, 61%, 62%, 63%, 64%, 65%, 66%, 67%, 68%, 69%, 70%, 71%, 72%, 73%, 74%, 75%, 76%, 77%, 78%, 79%, 80%, 81%, 82%, 83%, 84%, 85%, 86%, 87%, 88%, 89%, 90%, 91%, 92%, 93%, 94%, 95%, 96%, 97%, 98%, 99%, or 100%; from 46% to: 47%, 48%, 49%, 50%, 51%, 52%, 53%, 54%, 55%, 56%, 57%, 58%, 59%, 60%, 61%, 62%, 63%, 64%, 65%, 66%, 67%, 68%, 69%, 70%, 71%, 72%, 73%, 74%, 75%, 76%, 77%, 78%, 79%, 80%, 81%, 82%, 83%, 84%, 85%, 86%, 87%, 88%, 89%, 90%, 91%, 92%, 93%, 94%, 95%, 96%, 97%, 98%, 99%, or 100%; from 47% to: 48%, 49%, 50%, 51%, 52%, 53%, 54%, 55%, 56%, 57%, 58%, 59%, 60%, 61%, 62%, 63%, 64%, 65%, 66%, 67%, 68%, 69%, 70%, 71%, 72%, 73%, 74%, 75%, 76%, 77%, 78%, 79%, 80%, 81%, 82%, 83%, 84%, 85%, 86%, 87%, 88%, 89%, 90%, 91%, 92%, 93%, 94%, 95%, 96%, 97%, 98%, 99%, or 100%; from 48% to: 49%, 50%, 51%, 52%, 53%, 54%, 55%, 56%, 57%, 58%, 59%, 60%, 61%, 62%, 63%, 64%, 65%, 66%, 67%, 68%, 69%, 70%, 71%, 72%, 73%, 74%, 75%, 76%, 77%, 78%, 79%, 80%, 81%, 82%, 83%, 84%, 85%, 86%, 87%, 88%, 89%, 90%, 91%, 92%, 93%, 94%, 95%, 96%, 97%, 98%, 99%, or 100%; from 49% to: 50%, 51%, 52%, 53%, 54%, 55%, 56%, 57%, 58%, 59%, 60%, 61%, 62%, 63%, 64%, 65%, 66%, 67%, 68%, 69%, 70%, 71%, 72%, 73%, 74%, 75%, 76%, 77%, 78%, 79%, 80%, 81%, 82%, 83%, 84%, 85%, 86%, 87%, 88%, 89%, 90%, 91%, 92%, 93%, 94%, 95%, 96%, 97%, 98%, 99%, or 100%; from 50% to: 51%, 52%, 53%, 54%, 55%, 56%, 57%, 58%, 59%, 60%, 61%, 62%, 63%, 64%, 65%, 66%, 67%, 68%, 69%, 70%, 71%, 72%, 73%, 74%, 75%, 76%, 77%, 78%, 79%, 80%, 81%, 82%, 83%, 84%, 85%, 86%, 87%, 88%, 89%, 90%, 91%, 92%, 93%, 94%, 95%, 96%, 97%, 98%, 99%, or 100%; from 51% to: 52%, 53%, 54%, 55%, 56%, 57%, 58%, 59%, 60%, 61%, 62%, 63%, 64%, 65%, 66%, 67%, 68%, 69%, 70%, 71%, 72%, 73%, 74%, 75%, 76%, 77%, 78%, 79%, 80%, 81%, 82%, 83%, 84%, 85%, 86%, 87%, 88%, 89%, 90%, 91%, 92%, 93%, 94%, 95%, 96%, 97%, 98%, 99%, or 100%; from 52% to: 53%, 54%, 55%, 56%, 57%, 58%, 59%, 60%, 61%, 62%, 63%, 64%, 65%, 66%, 67%, 68%, 69%, 70%, 71%, 72%, 73%, 74%, 75%, 76%, 77%, 78%, 79%, 80%, 81%, 82%, 83%, 84%, 85%, 86%, 87%, 88%, 89%, 90%, 91%, 92%, 93%, 94%, 95%, 96%, 97%, 98%, 99%, or 100%; from 53% to: 54%, 55%, 56%, 57%, 58%, 59%, 60%, 61%, 62%, 63%, 64%, 65%, 66%, 67%, 68%, 69%, 70%, 71%, 72%, 73%, 74%, 75%, 76%, 77%, 78%, 79%, 80%, 81%, 82%, 83%, 84%, 85%, 86%, 87%, 88%, 89%, 90%, 91%, 92%, 93%, 94%, 95%, 96%, 97%, 98%, 99%, or 100%; from 54% to: 55%, 56%, 57%, 58%, 59%, 60%, 61%, 62%, 63%, 64%, 65%, 66%, 67%, 68%, 69%, 70%, 71%, 72%, 73%, 74%, 75%, 76%, 77%, 78%, 79%, 80%, 81%, 82%, 83%, 84%, 85%, 86%, 87%, 88%, 89%, 90%, 91%, 92%, 93%, 94%, 95%, 96%, 97%, 98%, 99%, or 100%; from 55% to: 56%, 57%, 58%, 59%, 60%, 61%, 62%, 63%, 64%, 65%, 66%, 67%, 68%, 69%, 70%, 71%, 72%, 73%, 74%, 75%, 76%, 77%, 78%, 79%, 80%, 81%, 82%, 83%, 84%, 85%, 86%, 87%, 88%, 89%, 90%, 91%, 92%, 93%, 94%, 95%, 96%, 97%, 98%, 99%, or 100%; from 56% to: 57%, 58%, 59%, 60%, 61%, 62%, 63%, 64%, 65%, 66%, 67%, 68%, 69%, 70%, 71%, 72%, 73%, 74%, 75%, 76%, 77%, 78%, 79%, 80%, 81%, 82%, 83%, 84%, 85%, 86%, 87%, 88%, 89%, 90%, 91%, 92%, 93%, 94%, 95%, 96%, 97%, 98%, 99%, or 100%; from 57% to: 58%, 59%, 60%, 61%, 62%, 63%, 64%, 65%, 66%, 67%, 68%, 69%, 70%, 71%, 72%, 73%, 74%, 75%, 76%, 77%, 78%, 79%, 80%, 81%, 82%, 83%, 84%, 85%, 86%, 87%, 88%, 89%, 90%, 91%, 92%, 93%, 94%, 95%, 96%, 97%, 98%, 99%, or 100%; from 58% to: 59%, 60%, 61%, 62%, 63%, 64%, 65%, 66%, 67%, 68%, 69%, 70%, 71%, 72%, 73%, 74%, 75%, 76%, 77%, 78%, 79%, 80%, 81%, 82%, 83%, 84%, 85%, 86%, 87%, 88%, 89%, 90%, 91%, 92%, 93%, 94%, 95%, 96%, 97%, 98%, 99%, or 100%; from 59% to: 60%, 61%, 62%, 63%, 64%, 65%, 66%, 67%, 68%, 69%, 70%, 71%, 72%, 73%, 74%, 75%, 76%, 77%, 78%, 79%, 80%, 81%, 82%, 83%, 84%, 85%, 86%, 87%, 88%, 89%, 90%, 91%, 92%, 93%, 94%, 95%, 96%, 97%, 98%, 99%, or 100%; from 60% to: 61%, 62%, 63%, 64%, 65%, 66%, 67%, 68%, 69%, 70%, 71%, 72%, 73%, 74%, 75%, 76%, 77%, 78%, 79%, 80%, 81%, 82%, 83%, 84%, 85%, 86%, 87%, 88%, 89%, 90%, 91%, 92%, 93%, 94%, 95%, 96%, 97%, 98%, 99%, or 100%; from 61% to: 62%, 63%, 64%, 65%, 66%, 67%, 68%, 69%, 70%, 71%, 72%, 73%, 74%, 75%, 76%, 77%, 78%, 79%, 80%, 81%, 82%, 83%, 84%, 85%, 86%, 87%, 88%, 89%, 90%, 91%, 92%, 93%, 94%, 95%, 96%, 97%, 98%, 99%, or 100%; from 62% to: 63%, 64%, 65%, 66%, 67%, 68%, 69%, 70%, 71%, 72%, 73%, 74%, 75%, 76%, 77%, 78%, 79%, 80%, 81%, 82%, 83%, 84%, 85%, 86%, 87%, 88%, 89%, 90%, 91%, 92%, 93%, 94%, 95%, 96%, 97%, 98%, 99%, or 100%; from 63% to: 64%, 65%, 66%, 67%, 68%, 69%, 70%, 71%, 72%, 73%, 74%, 75%, 76%, 77%, 78%, 79%, 80%, 81%, 82%, 83%, 84%, 85%, 86%, 87%, 88%, 89%, 90%, 91%, 92%, 93%, 94%, 95%, 96%, 97%, 98%, 99%, or 100%; from 64% to: 65%, 66%, 67%, 68%, 69%, 70%, 71%, 72%, 73%, 74%, 75%, 76%, 77%, 78%, 79%, 80%, 81%, 82%, 83%, 84%, 85%, 86%, 87%, 88%, 89%, 90%, 91%, 92%, 93%, 94%, 95%, 96%, 97%, 98%, 99%, or 100%; from 65% to: 66%, 67%, 68%, 69%, 70%, 71%, 72%, 73%, 74%, 75%, 76%, 77%, 78%, 79%, 80%, 81%, 82%, 83%, 84%, 85%, 86%, 87%, 88%, 89%, 90%, 91%, 92%, 93%, 94%, 95%, 96%, 97%, 98%, 99%, or 100%; from 66% to: 67%, 68%, 69%, 70%, 71%, 72%, 73%, 74%, 75%, 76%, 77%, 78%, 79%, 80%, 81%, 82%, 83%, 84%, 85%, 86%, 87%, 88%, 89%, 90%, 91%, 92%, 93%, 94%, 95%, 96%, 97%, 98%, 99%, or 100%; from 67% to: 68%, 69%, 70%, 71%, 72%, 73%, 74%, 75%, 76%, 77%, 78%, 79%, 80%, 81%, 82%, 83%, 84%, 85%, 86%, 87%, 88%, 89%, 90%, 91%, 92%, 93%, 94%, 95%, 96%, 97%, 98%, 99%, or 100%; from 68% to: 69% 70%, 71%, 72%, 73%, 74%, 75%, 76%, 77%, 78%, 79%, 80%, 81%, 82%, 83%, 84%, 85%, 86%, 87%, 88%, 89%, 90%, 91%, 92%, 93%, 94%, 95%, 96%, 97%, 98%, 99%, or 100%; or from 69% to 71%, 72%, 73%, 74%, 75%, 76%, 77%, 78%, 79%, 80%, 81%, 82%, 83%, 84%, 85%, 86%, 87%, 88%, 89%, 90%, 91%, 92%, 93%, 94%, 95%, 96%, 97%, 98%, 99%, or 100%. Also contemplated and supported are combinations of the above-noted “%” of “at least” or “%” of “no more than” with the percent substitution provided in the Examples section of this document. Also contemplated and supported are combinations of the percent substitution of the Example section of this document to provide a range (i.e. the percent substitution from [the percent substitution in RNA X₁ in the Examples] to [a percent substitution from [the percent substitution in RNA X₂ in the Examples] wherein X₁ and X₂ represent any two exemplary RNA molecules of the Examples.

[0215] In some embodiments, the percentage of cytosines substituted with a cytosine-substitutable modified nucleotide are at least: 10%, 11%, 12%, 13%, 14%, 15%, 16%, 17%, 18%, 19%, 20%, 21%, 22%, 23%, 24%, 25%, 26%, 27%, 28%, 29%, 30%, 31%, 32%, 33%, 34%, 35%, 36%, 37%, 38%, 39%, 40%, 41%, 42%, 43%, 44%, 45%, 46%, 47%, 48%, 49%, 50%, 51%, 52%, 53%, 54%, 55%, 56%, 57%, 58%, 59%, 60%, 61%, 62%, 63%, 64%, 65%, 66%, 67%, 68%, 69%, 70%, 71%, 72%, 73%, 74%, 75%, 76%, 77%, 78%, 79%, 80%, 81%, 82%, 83%, 84%, 85%, 86%, 87%, 88%, 89%, 90%, 91%, 92%, 93%, 94%, 95%, 96%, 97%, 98%, 99%, or 100%. In some embodiments, the percentage of cytosines substituted with a cytosine-substitutable modified nucleotide are no more than: 80%, 79%, 78%, 77%, 76%, 75%, 74%, 73%, 72%, 71%, 70%, 69%, 68%, 67%, 66%, 65%, 64%, 63%, 62%, 61%, 60%, 59%, 58%, 57%, 56%, 55%, 54%, 53%, 52%, 51%, 50%, 49%, 48%, 47%, 46%, 45%, 44%, 43%, 42%, 41%, 40%, 39%, 38%, 37%, 36%, 35%, 34%, 33%, 32%, 31%, 30%, 29%, 28%, 27%, 26%, 25%, 24%, 23%, 22%, 21%, 20%, 19%, 18%, 17%, 16%, or 15%. Taking the above-noted embodiments into account, it is contemplated and supported that any of the above-noted “%” of “at least” and any of the above-noted “%” of “no more than” may be combined to provide an enclosed range (i.e. the percentage of cytosines substituted with a cytosine-substitutable modified nucleotide are from 25% to 75%). In some embodiments, the percentage of cytosines substituted with a cytosine-substitutable modified nucleotide are from 20% to: 21%, 22%, 23%, 24%, 25%, 26%, 27%, 28%, 29%, 30%, 31%, 32%, 33%, 34%, 35%, 36%, 37%, 38%, 39%, 40%, 41%, 42%, 43%, 44%, 45%, 46%, 47%, 48%, 49%, 50%, 51%, 52%, 53%, 54%, 55%, 56%, 57%, 58%, 59%, 60%, 61%, 62%, 63%, 64%, 65%, 66%, 67%, 68%, 69%, 70%, 71%, 72%, 73%, 74%, 75%, 76%, 77%, 78%, 79%, 80%, 81%, 82%, 83%, 84%, 85%, 86%, 87%, 88%, 89%, 90%, 91%, 92%, 93%, 94%, 95%, 96%, 97%, 98%, 99%, or 100%; from 21% to: 22%, 23%, 24%, 25%, 26%, 27%, 28%, 29%, 30%, 31%, 32%, 33%, 34%, 35%, 36%, 37%, 38%, 39%, 40%, 41%, 42%, 43%, 44%, 45%, 46%, 47%, 48%, 49%, 50%, 51%, 52%, 53%, 54%, 55%, 56%, 57%, 58%, 59%, 60%, 61%, 62%, 63%, 64%, 65%, 66%, 67%, 68%, 69%, 70%, 71%, 72%, 73%, 74%, 75%, 76%, 77%, 78%, 79%, 80%, 81%, 82%, 83%, 84%, 85%, 86%, 87%, 88%, 89%, 90%, 91%, 92%, 93%, 94%, 95%, 96%, 97%, 98%, 99%, or 100%; from 22% to: 23%,24%,25%,26%,27%,28%,29%,30%,31%,32%,33%,34%,35%,36%,37%,38%,39%, 40%, 41%, 42%, 43%, 44%, 45%, 46%, 47%, 48%, 49%, 50%, 51%, 52%, 53%, 54%, 55%, 56%, 57%, 58%, 59%, 60%, 61%, 62%, 63%, 64%, 65%, 66%, 67%, 68%, 69%, 70%, 71%, 72%, 73%, 74%, 75%, 76%, 77%, 78%, 79%, 80%, 81%, 82%, 83%, 84%, 85%, 86%, 87%, 88%, 89%, 90%, 91%, 92%, 93%, 94%, 95%, 96%, 97%, 98%, 99%, or 100%; from 23% to: 24%, 25%, 26%,27%,28%,29%,30%,31%, 32%, 33%, 34%, 35%, 36%, 37%, 38%, 39%, 40%, 41%,42%, 43%, 44%, 45%, 46%, 47%, 48%, 49%, 50%, 51%, 52%, 53%, 54%, 55%, 56%, 57%, 58%, 59%, 60%, 61%, 62%, 63%, 64%, 65%, 66%, 67%, 68%, 69%, 70%, 71%, 72%, 73%, 74%, 75%, 76%, 77%, 78%, 79%, 80%, 81%, 82%, 83%, 84%, 85%, 86%, 87%, 88%, 89%, 90%, 91%, 92%, 93%, 94%, 95%, 96%, 97%, 98%, 99%, or 100%; from 24% to: 25%, 26%, 27%, 28%, 29%, 30%, 31%,32%,33%,34%,35%,36%,37%,38%,39%,40%,41%,42%,43%,44%,45%,46%, 47%, 48%, 49%, 50%, 51%, 52%, 53%, 54%, 55%, 56%, 57%, 58%, 59%, 60%, 61%, 62%, 63%, 64%, 65%, 66%, 67%, 68%, 69%, 70%, 71%, 72%, 73%, 74%, 75%, 76%, 77%, 78%, 79%, 80%, 81%, 82%, 83%, 84%, 85%, 86%, 87%, 88%, 89%, 90%, 91%, 92%, 93%, 94%, 95%, 96%, 97%, 98%, 99%, or 100%; from 25% to: 26%, 27%, 28%, 29%, 30%, 31%, 32%, 33%, 34%, 35%, 36%,37%,38%,39%,40%,41%, 42%, 43%, 44%, 45%, 46%, 47%, 48%, 49%, 50%, 51%,52%, 53%, 54%, 55%, 56%, 57%, 58%, 59%, 60%, 61%, 62%, 63%, 64%, 65%, 66%, 67%, 68%, 69%, 70%, 71%, 72%, 73%, 74%, 75%, 76%, 77%, 78%, 79%, 80%, 81%, 82%, 83%, 84%, 85%, 86%, 87%, 88%, 89%, 90%, 91%, 92%, 93%, 94%, 95%, 96%, 97%, 98%, 99%, or 100%; from 26% to: 27%, 28%, 29%, 30%, 31%, 32%, 33%, 34%, 35%, 36%, 37%, 38%, 39%, 40%, 41%, 42%, 43%, 44%, 45%, 46%, 47%, 48%, 49%, 50%, 51%, 52%, 53%, 54%, 55%, 56%, 57%, 58%, 59%, 60%, 61%, 62%, 63%, 64%, 65%, 66%, 67%, 68%, 69%, 70%, 71%, 72%, 73%, 74%, 75%, 76%, 77%, 78%, 79%, 80%, 81%, 82%, 83%, 84%, 85%, 86%, 87%, 88%, 89%, 90%, 91%, 92%, 93%, 94%, 95%, 96%, 97%, 98%, 99%, or 100%; from 27% to: 28%, 29%, 30%, 31%, 32%, 33%, 34%, 35%, 36%, 37%, 38%, 39%, 40%, 41%, 42%, 43%, 44%, 45%, 46%, 47%, 48%, 49%, 50%, 51%, 52%, 53%, 54%, 55%, 56%, 57%, 58%, 59%, 60%, 61%, 62%, 63%, 64%, 65%, 66%, 67%, 68%, 69%, 70%, 71%, 72%, 73%, 74%, 75%, 76%, 77%, 78%, 79%, 80%, 81%, 82%, 83%, 84%, 85%, 86%, 87%, 88%, 89%, 90%, 91%, 92%, 93%, 94%, 95%, 96%, 97%, 98%, 99%, or 100%; from 28% to: 29%, 30%, 31%, 32%, 33%, 34%, 35%, 36%, 37%, 38%, 39%, 40%, 41%, 42%, 43%, 44%, 45%, 46%, 47%, 48%, 49%, 50%, 51%, 52%, 53%, 54%, 55%, 56%, 57%, 58%, 59%, 60%, 61%, 62%, 63%, 64%, 65%, 66%, 67%, 68%, 69%, 70%, 71%, 72%, 73%, 74%, 75%, 76%, 77%, 78%, 79%, 80%, 81%, 82%, 83%, 84%, 85%, 86%, 87%, 88%, 89%, 90%, 91%, 92%, 93%, 94%, 95%, 96%, 97%, 98%, 99%, or 100%; from 29% to: 30%, 31%, 32%, 33%, 34%, 35%,36%,37%,38%,39%,40%,41%, 42%, 43%, 44%, 45%, 46%, 47%, 48%, 49%, 50%, 51%, 52%, 53%, 54%, 55%, 56%, 57%, 58%, 59%, 60%, 61%, 62%, 63%, 64%, 65%, 66%, 67%, 68%, 69%, 70%, 71%, 72%, 73%, 74%, 75%, 76%, 77%, 78%, 79%, 80%, 81%, 82%, 83%, 84%, 85%, 86%, 87%, 88%, 89%, 90%, 91%, 92%, 93%, 94%, 95%, 96%, 97%, 98%, 99%, or 100%; from 30% to: 31%, 32%, 33%, 34%, 35%, 36%, 37%, 38%, 39%, 40%, 41%, 42%, 43%, 44%, 45%, 46%, 47%, 48%, 49%, 50%, 51%, 52%, 53%, 54%, 55%, 56%, 57%, 58%, 59%, 60%, 61%, 62%, 63%, 64%, 65%, 66%, 67%, 68%, 69%, 70%, 71%, 72%, 73%, 74%, 75%, 76%, 77%, 78%, 79%, 80%, 81%, 82%, 83%, 84%, 85%, 86%, 87%, 88%, 89%, 90%, 91%, 92%, 93%, 94%, 95%, 96%, 97%, 98%, 99%, or 100%; from 31% to: 32%, 33%, 34%, 35%, 36%, 37%, 38%, 39%, 40%, 41%, 42%, 43%, 44%, 45%, 46%, 47%, 48%, 49%, 50%, 51%, 52%, 53%, 54%, 55%, 56%, 57%, 58%, 59%, 60%, 61%, 62%, 63%, 64%, 65%, 66%, 67%, 68%, 69%, 70%, 71%, 72%, 73%, 74%, 75%, 76%, 77%, 78%, 79%, 80%, 81%, 82%, 83%, 84%, 85%, 86%, 87%, 88%, 89%, 90%, 91%, 92%, 93%, 94%, 95%, 96%, 97%, 98%, 99%, or 100%; from 32% to: 33%, 34%, 35%, 36%, 37%, 38%, 39%, 40%, 41%, 42%, 43%, 44%, 45%, 46%, 47%, 48%, 49%, 50%, 51%, 52%, 53%, 54%, 55%, 56%, 57%, 58%, 59%, 60%, 61%, 62%, 63%, 64%, 65%, 66%, 67%, 68%, 69%, 70%, 71%, 72%, 73%, 74%, 75%, 76%, 77%, 78%, 79%, 80%, 81%, 82%, 83%, 84%, 85%, 86%, 87%, 88%, 89%, 90%, 91%, 92%, 93%, 94%, 95%, 96%, 97%, 98%, 99%, or 100%; from 33% to: 34%, 35%, 36%, 37%, 38%, 39%, 40%, 41%, 42%, 43%, 44%, 45%, 46%, 47%, 48%, 49%, 50%, 51%, 52%, 53%, 54%, 55%, 56%, 57%, 58%, 59%, 60%, 61%, 62%, 63%, 64%, 65%, 66%, 67%, 68%, 69%, 70%, 71%, 72%, 73%, 74%, 75%, 76%, 77%, 78%, 79%, 80%, 81%, 82%, 83%, 84%, 85%, 86%, 87%, 88%, 89%, 90%, 91%, 92%, 93%, 94%, 95%, 96%, 97%, 98%, 99%, or 100%; from 34% to: 35%, 36%, 37%, 38%, 39%, 40%, 41%, 42%, 43%, 44%, 45%, 46%, 47%, 48%, 49%, 50%, 51%, 52%, 53%, 54%, 55%, 56%, 57%, 58%, 59%, 60%, 61%, 62%, 63%, 64%, 65%, 66%, 67%, 68%, 69%, 70%, 71%, 72%, 73%, 74%, 75%, 76%, 77%, 78%, 79%, 80%, 81%, 82%, 83%, 84%, 85%, 86%, 87%, 88%, 89%, 90%, 91%, 92%, 93%, 94%, 95%, 96%, 97%, 98%, 99%, or 100%; from 35% to: 36%, 37%, 38%, 39%, 40%, 41%, 42%, 43%, 44%, 45%, 46%, 47%, 48%, 49%, 50%, 51%, 52%, 53%, 54%, 55%, 56%, 57%, 58%, 59%, 60%, 61%, 62%, 63%, 64%, 65%, 66%, 67%, 68%, 69%, 70%, 71%, 72%, 73%, 74%, 75%, 76%, 77%, 78%, 79%, 80%, 81%, 82%, 83%, 84%, 85%, 86%, 87%, 88%, 89%, 90%, 91%, 92%, 93%, 94%, 95%, 96%, 97%, 98%, 99%, or 100%; from 36% to: 37%, 38%, 39%, 40%, 41%, 42%, 43%, 44%, 45%, 46%, 47%, 48%, 49%, 50%, 51%, 52%, 53%, 54%, 55%, 56%, 57%, 58%, 59%, 60%, 61%, 62%, 63%, 64%, 65%, 66%, 67%, 68%, 69%, 70%, 71%, 72%, 73%, 74%, 75%, 76%, 77%, 78%, 79%, 80%, 81%, 82%, 83%, 84%, 85%, 86%, 87%, 88%, 89%, 90%, 91%, 92%, 93%, 94%, 95%, 96%, 97%, 98%, 99%, or 100%; from 37% to: 38%, 39%, 40%, 41%, 42%, 43%, 44%, 45%, 46%, 47%, 48%, 49%, 50%, 51%, 52%, 53%, 54%, 55%, 56%, 57%, 58%, 59%, 60%, 61%, 62%, 63%, 64%, 65%, 66%, 67%, 68%, 69%, 70%, 71%, 72%, 73%, 74%, 75%, 76%, 77%, 78%, 79%, 80%, 81%, 82%, 83%, 84%, 85%, 86%, 87%, 88%, 89%, 90%, 91%, 92%, 93%, 94%, 95%, 96%, 97%, 98%, 99%, or 100%; from 38% to: 39%, 40%, 41%, 42%, 43%, 44%, 45%, 46%, 47%, 48%, 49%, 50%, 51%, 52%, 53%, 54%, 55%, 56%, 57%, 58%, 59%, 60%, 61%, 62%, 63%, 64%, 65%, 66%, 67%, 68%, 69%, 70%, 71%, 72%, 73%, 74%, 75%, 76%, 77%, 78%, 79%, 80%, 81%, 82%, 83%, 84%, 85%, 86%, 87%, 88%, 89%, 90%, 91%, 92%, 93%, 94%, 95%, 96%, 97%, 98%, 99%, or 100%; from 39% to: 40%, 41%, 42%, 43%, 44%, 45%, 46%, 47%, 48%, 49%, 50%, 51%, 52%, 53%, 54%, 55%, 56%, 57%, 58%, 59%, 60%, 61%, 62%, 63%, 64%, 65%, 66%, 67%, 68%, 69%, 70%, 71%, 72%, 73%, 74%, 75%, 76%, 77%, 78%, 79%, 80%, 81%, 82%, 83%, 84%, 85%, 86%, 87%, 88%, 89%, 90%, 91%, 92%, 93%, 94%, 95%, 96%, 97%, 98%, 99%, or 100%; from 40% to: 41%, 42%, 43%, 44%, 45%, 46%, 47%, 48%, 49%, 50%, 51%, 52%, 53%, 54%, 55%, 56%, 57%, 58%, 59%, 60%, 61%, 62%, 63%, 64%, 65%, 66%, 67%, 68%, 69%, 70%, 71%, 72%, 73%, 74%, 75%, 76%, 77%, 78%, 79%, 80%, 81%, 82%, 83%, 84%, 85%, 86%, 87%, 88%, 89%, 90%, 91%, 92%, 93%, 94%, 95%, 96%, 97%, 98%, 99%, or 100%; from 41% to: 41%, 42%, 43%, 44%, 45%, 46%, 47%, 48%, 49%, 50%, 51%, 52%, 53%, 54%, 55%, 56%, 57%, 58%, 59%, 60%, 61%, 62%, 63%, 64%, 65%, 66%, 67%, 68%, 69%, 70%, 71%, 72%, 73%, 74%, 75%, 76%, 77%, 78%, 79%, 80%, 81%, 82%, 83%, 84%, 85%, 86%, 87%, 88%, 89%, 90%, 91%, 92%, 93%, 94%, 95%, 96%, 97%, 98%, 99%, or 100%; from 42% to: 43%, 44%, 45%, 46%, 47%, 48%, 49%, 50%, 51%, 52%, 53%, 54%, 55%, 56%, 57%, 58%, 59%, 60%, 61%, 62%, 63%, 64%, 65%, 66%, 67%, 68%, 69%, 70%, 71%, 72%, 73%, 74%, 75%, 76%, 77%, 78%, 79%, 80%, 81%, 82%, 83%, 84%, 85%, 86%, 87%, 88%, 89%, 90%, 91%, 92%, 93%, 94%, 95%, 96%, 97%, 98%, 99%, or 100%; from 43% to: 44%, 45%, 46%, 47%, 48%, 49%, 50%, 51%, 52%, 53%, 54%, 55%, 56%, 57%, 58%, 59%, 60%, 61%, 62%, 63%, 64%, 65%, 66%, 67%, 68%, 69%, 70%, 71%, 72%, 73%, 74%, 75%, 76%, 77%, 78%, 79%, 80%, 81%, 82%, 83%, 84%, 85%, 86%, 87%, 88%, 89%, 90%, 91%, 92%, 93%, 94%, 95%, 96%, 97%, 98%, 99%, or 100%; from 44% to: 45%, 46%, 47%, 48%, 49%, 50%, 51%, 52%, 53%, 54%, 55%, 56%, 57%, 58%, 59%, 60%, 61%, 62%, 63%, 64%, 65%, 66%, 67%, 68%, 69%, 70%, 71%, 72%, 73%, 74%, 75%, 76%, 77%, 78%, 79%, 80%, 81%, 82%, 83%, 84%, 85%, 86%, 87%, 88%, 89%, 90%, 91%, 92%, 93%, 94%, 95%, 96%, 97%, 98%, 99%, or 100%; from 45% to: 46%, 47%, 48%, 49%, 50%, 51%, 52%, 53%, 54%, 55%, 56%, 57%, 58%, 59%, 60%, 61%, 62%, 63%, 64%, 65%, 66%, 67%, 68%, 69%, 70%, 71%, 72%, 73%, 74%, 75%, 76%, 77%, 78%, 79%, 80%, 81%, 82%, 83%, 84%, 85%, 86%, 87%, 88%, 89%, 90%, 91%, 92%, 93%, 94%, 95%, 96%, 97%, 98%, 99%, or 100%; from 46% to: 47%, 48%, 49%, 50%, 51%, 52%, 53%, 54%, 55%, 56%, 57%, 58%, 59%, 60%, 61%, 62%, 63%, 64%, 65%, 66%, 67%, 68%, 69%, 70%, 71%, 72%, 73%, 74%, 75%, 76%, 77%, 78%, 79%, 80%, 81%, 82%, 83%, 84%, 85%, 86%, 87%, 88%, 89%, 90%, 91%, 92%, 93%, 94%, 95%, 96%, 97%, 98%, 99%, or 100%; from 47% to: 48%, 49%, 50%, 51%, 52%, 53%, 54%, 55%, 56%, 57%, 58%, 59%, 60%, 61%, 62%, 63%, 64%, 65%, 66%, 67%, 68%, 69%, 70%, 71%, 72%, 73%, 74%, 75%, 76%, 77%, 78%, 79%, 80%, 81%, 82%, 83%, 84%, 85%, 86%, 87%, 88%, 89%, 90%, 91%, 92%, 93%, 94%, 95%, 96%, 97%, 98%, 99%, or 100%; from 48% to: 49%, 50%, 51%, 52%, 53%, 54%, 55%, 56%, 57%, 58%, 59%, 60%, 61%, 62%, 63%, 64%, 65%, 66%, 67%, 68%, 69%, 70%, 71%, 72%, 73%, 74%, 75%, 76%, 77%, 78%, 79%, 80%, 81%, 82%, 83%, 84%, 85%, 86%, 87%, 88%, 89%, 90%, 91%, 92%, 93%, 94%, 95%, 96%, 97%, 98%, 99%, or 100%; from 49% to: 50%, 51%, 52%, 53%, 54%, 55%, 56%, 57%, 58%, 59%, 60%, 61%, 62%, 63%, 64%, 65%, 66%, 67%, 68%, 69%, 70%, 71%, 72%, 73%, 74%, 75%, 76%, 77%, 78%, 79%, 80%, 81%, 82%, 83%, 84%, 85%, 86%, 87%, 88%, 89%, 90%, 91%, 92%, 93%, 94%, 95%, 96%, 97%, 98%, 99%, or 100%; from 50% to: 51%, 52%, 53%, 54%, 55%, 56%, 57%, 58%, 59%, 60%, 61%, 62%, 63%, 64%, 65%, 66%, 67%, 68%, 69%, 70%, 71%, 72%, 73%, 74%, 75%, 76%, 77%, 78%, 79%, 80%, 81%, 82%, 83%, 84%, 85%, 86%, 87%, 88%, 89%, 90%, 91%, 92%, 93%, 94%, 95%, 96%, 97%, 98%, 99%, or 100%; from 51% to: 52%, 53%, 54%, 55%, 56%, 57%, 58%, 59%, 60%, 61%, 62%, 63%, 64%, 65%, 66%, 67%, 68%, 69%, 70%, 71%, 72%, 73%, 74%, 75%, 76%, 77%, 78%, 79%, 80%, 81%, 82%, 83%, 84%, 85%, 86%, 87%, 88%, 89%, 90%, 91%, 92%, 93%, 94%, 95%, 96%, 97%, 98%, 99%, or 100%; from 52% to: 53%, 54%, 55%, 56%, 57%, 58%, 59%, 60%, 61%, 62%, 63%, 64%, 65%, 66%, 67%, 68%, 69%, 70%, 71%, 72%, 73%, 74%, 75%, 76%, 77%, 78%, 79%, 80%, 81%, 82%, 83%, 84%, 85%, 86%, 87%, 88%, 89%, 90%, 91%, 92%, 93%, 94%, 95%, 96%, 97%, 98%, 99%, or 100%; from 53% to: 54%, 55%, 56%, 57%, 58%, 59%, 60%, 61%, 62%, 63%, 64%, 65%, 66%, 67%, 68%, 69%, 70%, 71%, 72%, 73%, 74%, 75%, 76%, 77%, 78%, 79%, 80%, 81%, 82%, 83%, 84%, 85%, 86%, 87%, 88%, 89%, 90%, 91%, 92%, 93%, 94%, 95%, 96%, 97%, 98%, 99%, or 100%; from 54% to: 55%, 56%, 57%, 58%, 59%, 60%, 61%, 62%, 63%, 64%, 65%, 66%, 67%, 68%, 69%, 70%, 71%, 72%, 73%, 74%, 75%, 76%, 77%, 78%, 79%, 80%, 81%, 82%, 83%, 84%, 85%, 86%, 87%, 88%, 89%, 90%, 91%, 92%, 93%, 94%, 95%, 96%, 97%, 98%, 99%, or 100%; from 55% to: 56%, 57%, 58%, 59%, 60%, 61%, 62%, 63%, 64%, 65%, 66%, 67%, 68%, 69%, 70%, 71%, 72%, 73%, 74%, 75%, 76%, 77%, 78%, 79%, 80%, 81%, 82%, 83%, 84%, 85%, 86%, 87%, 88%, 89%, 90%, 91%, 92%, 93%, 94%, 95%, 96%, 97%, 98%, 99%, or 100%; from 56% to: 57%, 58%, 59%, 60%, 61%, 62%, 63%, 64%, 65%, 66%, 67%, 68%, 69%, 70%, 71%, 72%, 73%, 74%, 75%, 76%, 77%, 78%, 79%, 80%, 81%, 82%, 83%, 84%, 85%, 86%, 87%, 88%, 89%, 90%, 91%, 92%, 93%, 94%, 95%, 96%, 97%, 98%, 99%, or 100%; from 57% to: 58%, 59%, 60%, 61%, 62%, 63%, 64%, 65%, 66%, 67%, 68%, 69%, 70%, 71%, 72%, 73%, 74%, 75%, 76%, 77%, 78%, 79%, 80%, 81%, 82%, 83%, 84%, 85%, 86%, 87%, 88%, 89%, 90%, 91%, 92%, 93%, 94%, 95%, 96%, 97%, 98%, 99%, or 100%; from 58% to: 59%, 60%, 61%, 62%, 63%, 64%, 65%, 66%, 67%, 68%, 69%, 70%, 71%, 72%, 73%, 74%, 75%, 76%, 77%, 78%, 79%, 80%, 81%, 82%, 83%, 84%, 85%, 86%, 87%, 88%, 89%, 90%, 91%, 92%, 93%, 94%, 95%, 96%, 97%, 98%, 99%, or 100%; from 59% to: 60%, 61%, 62%, 63%, 64%, 65%, 66%, 67%, 68%, 69%, 70%, 71%, 72%, 73%, 74%, 75%, 76%, 77%, 78%, 79%, 80%, 81%, 82%, 83%, 84%, 85%, 86%, 87%, 88%, 89%, 90%, 91%, 92%, 93%, 94%, 95%, 96%, 97%, 98%, 99%, or 100%; from 60% to: 61%, 62%, 63%, 64%, 65%, 66%, 67%, 68%, 69%, 70%, 71%, 72%, 73%, 74%, 75%, 76%, 77%, 78%, 79%, 80%, 81%, 82%, 83%, 84%, 85%, 86%, 87%, 88%, 89%, 90%, 91%, 92%, 93%, 94%, 95%, 96%, 97%, 98%, 99%, or 100%; from 61% to: 62%, 63%, 64%, 65%, 66%, 67%, 68%, 69%, 70%, 71%, 72%, 73%, 74%, 75%, 76%, 77%, 78%, 79%, 80%, 81%, 82%, 83%, 84%, 85%, 86%, 87%, 88%, 89%, 90%, 91%, 92%, 93%, 94%, 95%, 96%, 97%, 98%, 99%, or 100%; from 62% to: 63%, 64%, 65%, 66%, 67%, 68%, 69%, 70%, 71%, 72%, 73%, 74%, 75%, 76%, 77%, 78%, 79%, 80%, 81%, 82%, 83%, 84%, 85%, 86%, 87%, 88%, 89%, 90%, 91%, 92%, 93%, 94%, 95%, 96%, 97%, 98%, 99%, or 100%; from 63% to: 64%, 65%, 66%, 67%, 68%, 69%, 70%, 71%, 72%, 73%, 74%, 75%, 76%, 77%, 78%, 79%, 80%, 81%, 82%, 83%, 84%, 85%, 86%, 87%, 88%, 89%, 90%, 91%, 92%, 93%, 94%, 95%, 96%, 97%, 98%, 99%, or 100%; from 64% to: 65%, 66%, 67%, 68%, 69%, 70%, 71%, 72%, 73%, 74%, 75%, 76%, 77%, 78%, 79%, 80%, 81%, 82%, 83%, 84%, 85%, 86%, 87%, 88%, 89%, 90%, 91%, 92%, 93%, 94%, 95%, 96%, 97%, 98%, 99%, or 100%; from 65% to: 66%, 67%, 68%, 69%, 70%, 71%, 72%, 73%, 74%, 75%, 76%, 77%, 78%, 79%, 80%, 81%, 82%, 83%, 84%, 85%, 86%, 87%, 88%, 89%, 90%, 91%, 92%, 93%, 94%, 95%, 96%, 97%, 98%, 99%, or 100%; from 66% to: 67%, 68%, 69%, 70%, 71%, 72%, 73%, 74%, 75%, 76%, 77%, 78%, 79%, 80%, 81%, 82%, 83%, 84%, 85%, 86%, 87%, 88%, 89%, 90%, 91%, 92%, 93%, 94%, 95%, 96%, 97%, 98%, 99%, or 100%; from 67% to: 68%, 69%, 70%, 71%, 72%, 73%, 74%, 75%, 76%, 77%, 78%, 79%, 80%, 81%, 82%, 83%, 84%, 85%, 86%, 87%, 88%, 89%, 90%, 91%, 92%, 93%, 94%, 95%, 96%, 97%, 98%, 99%, or 100%; from 68% to: 69% 70%, 71%, 72%, 73%, 74%, 75%, 76%, 77%, 78%, 79%, 80%, 81%, 82%, 83%, 84%, 85%, 86%, 87%, 88%, 89%, 90%, 91%, 92%, 93%, 94%, 95%, 96%, 97%, 98%, 99%, or 100%; or from 69% to 71%, 72%, 73%, 74%, 75%, 76%, 77%, 78%, 79%, 80%, 81%, 82%, 83%, 84%, 85%, 86%, 87%, 88%, 89%, 90%, 91%, 92%, 93%, 94%, 95%, 96%, 97%, 98%, 99%, or 100%. Also contemplated and supported are combinations of the above-noted “%” of “at least” or “%” of “no more than” with the percent substitution provided in the Examples section of this document. Also contemplated and supported are combinations of the percent substitution of the Example section of this document to provide a range (i.e. the percent substitution from [the percent substitution in RNA X₁ in the Examples] to [a percent substitution from [the percent substitution in RNA X₂ in the Examples] wherein X₁ and X₂ represent any two exemplary RNA molecules of the Examples.

[0216] In some embodiments, the percentage of guanosines substituted with a guanosine-substitutable modified nucleotide are at least: 10%, 11%, 12%,13%,14%,15%,16%,17%,18%,19%,20%, 21%, 22%, 23%, 24%, 25%, 26%, 27%, 28%, 29%, 30%, 31%, 32%, 33%, 34%, 35%, 36%, 37%, 38%, 39%, 40%, 41%, 42%, 43%, 44%, 45%, 46%, 47%, 48%, 49%, 50%, 51%, 52%, 53%, 54%, 55%, 56%, 57%, 58%, 59%, 60%, 61%, 62%, 63%, 64%, 65%, 66%, 67%, 68%, 69%, 70%, 71%, 72%, 73%, 74%, 75%, 76%, 77%, 78%, 79%, 80%, 81%, 82%, 83%, 84%, 85%, 86%, 87%, 88%, 89%, 90%, 91%, 92%, 93%, 94%, 95%, 96%, 97%, 98%, 99%, or 100%. In some embodiments, the percentage of guanosines substituted with a guanosine-substitutable modified nucleotide are no more than: 80%, 79%, 78%, 77%, 76%, 75%, 74%, 73%, 72%, 71%, 70%, 69%, 68%, 67%, 66%, 65%, 64%, 63%, 62%, 61%, 60%, 59%, 58%, 57%, 56%, 55%, 54%, 53%, 52%, 51%, 50%, 49%, 48%, 47%, 46%, 45%, 44%, 43%, 42%, 41%, 40%, 39%, 38%, 37%,36%,35%,34%,33%,32%,31%,30%,29%,28%,27%,26%,25%,24%,23%,22%,21%, 20%, 19%, 18%, 17%, 16%, or 15%. Taking the above-noted embodiments into account, it is contemplated and supported that any of the above-noted “%” of “at least” and any of the above-noted “%” of “no more than” may be combined to provide an enclosed range (i.e. the percentage of guanosines substituted with a guanosine-substitutable modified nucleotide are from 25% to 75%). In some embodiments, the percentage of guanosines substituted with a guanosine-substitutable modified nucleotide are from 20% to: 21%, 22%, 23%, 24%, 25%, 26%, 27%, 28%, 29%, 30%, 31%, 32%, 33%, 34%, 35%, 36%, 37%, 38%, 39%, 40%, 41%, 42%, 43%, 44%, 45%, 46%, 47%, 48%, 49%, 50%, 51%, 52%, 53%, 54%, 55%, 56%, 57%, 58%, 59%, 60%, 61%, 62%, 63%, 64%, 65%, 66%, 67%, 68%, 69%, 70%, 71%, 72%, 73%, 74%, 75%, 76%, 77%, 78%, 79%, 80%, 81%, 82%, 83%, 84%, 85%, 86%, 87%, 88%, 89%, 90%, 91%, 92%, 93%, 94%, 95%, 96%, 97%, 98%, 99%, or 100%; from 21% to: 22%, 23%, 24%, 25%, 26%, 27%, 28%, 29%, 30%, 31%, 32%, 33%, 34%, 35%, 36%, 37%, 38%, 39%, 40%, 41%, 42%, 43%, 44%, 45%, 46%, 47%, 48%, 49%, 50%, 51%, 52%, 53%, 54%, 55%, 56%, 57%, 58%, 59%, 60%, 61%, 62%, 63%, 64%, 65%, 66%, 67%, 68%, 69%, 70%, 71%, 72%, 73%, 74%, 75%, 76%, 77%, 78%, 79%, 80%, 81%, 82%, 83%, 84%, 85%, 86%, 87%, 88%, 89%, 90%, 91%, 92%, 93%, 94%, 95%, 96%, 97%, 98%, 99%, or 100%; from 22% to: 23%, 24%, 25%, 26%, 27%, 28%, 29%, 30%, 31%, 32%, 33%, 34%, 35%, 36%, 37%, 38%, 39%, 40%, 41%, 42%, 43%, 44%, 45%, 46%, 47%, 48%, 49%, 50%, 51%, 52%, 53%, 54%, 55%, 56%, 57%, 58%, 59%, 60%, 61%, 62%, 63%, 64%, 65%, 66%, 67%, 68%, 69%, 70%, 71%, 72%, 73%, 74%, 75%, 76%, 77%, 78%, 79%, 80%, 81%, 82%, 83%, 84%, 85%, 86%, 87%, 88%, 89%, 90%, 91%, 92%, 93%, 94%, 95%, 96%, 97%, 98%, 99%, or 100%; from 23% to: 24%, 25%, 26%, 27%, 28%, 29%, 30%, 31%, 32%, 33%, 34%, 35%, 36%, 37%, 38%, 39%, 40%, 41%, 42%, 43%, 44%, 45%, 46%, 47%, 48%, 49%, 50%, 51%, 52%, 53%, 54%, 55%, 56%, 57%, 58%, 59%, 60%, 61%, 62%, 63%, 64%, 65%, 66%, 67%, 68%, 69%, 70%, 71%, 72%, 73%, 74%, 75%, 76%, 77%, 78%, 79%, 80%, 81%, 82%, 83%, 84%, 85%, 86%, 87%, 88%, 89%, 90%, 91%, 92%, 93%, 94%, 95%, 96%, 97%, 98%, 99%, or 100%; from 24% to: 25%, 26%, 27%, 28%, 29%, 30%, 31%, 32%, 33%, 34%, 35%, 36%, 37%, 38%, 39%, 40%, 41%, 42%, 43%, 44%, 45%, 46%, 47%, 48%, 49%, 50%, 51%, 52%, 53%, 54%, 55%, 56%, 57%, 58%, 59%, 60%, 61%, 62%, 63%, 64%, 65%, 66%, 67%, 68%, 69%, 70%, 71%, 72%, 73%, 74%, 75%, 76%, 77%, 78%, 79%, 80%, 81%, 82%, 83%, 84%, 85%, 86%, 87%, 88%, 89%, 90%, 91%, 92%, 93%, 94%, 95%, 96%, 97%, 98%, 99%, or 100%; from 25% to: 26%, 27%, 28%, 29%, 30%, 31%, 32%, 33%, 34%, 35%, 36%, 37%, 38%, 39%, 40%, 41%, 42%, 43%, 44%, 45%, 46%, 47%, 48%, 49%, 50%, 51%, 52%, 53%, 54%, 55%, 56%, 57%, 58%, 59%, 60%, 61%, 62%, 63%, 64%, 65%, 66%, 67%, 68%, 69%, 70%, 71%, 72%, 73%, 74%, 75%, 76%, 77%, 78%, 79%, 80%, 81%, 82%, 83%, 84%, 85%, 86%, 87%, 88%, 89%, 90%, 91%, 92%, 93%, 94%, 95%, 96%, 97%, 98%, 99%, or 100%; from 26% to: 27%, 28%, 29%, 30%, 31%, 32%, 33%, 34%, 35%, 36%, 37%, 38%, 39%, 40%, 41%, 42%, 43%, 44%, 45%, 46%, 47%, 48%, 49%, 50%, 51%, 52%, 53%, 54%, 55%, 56%, 57%, 58%, 59%, 60%, 61%, 62%, 63%, 64%, 65%, 66%, 67%, 68%, 69%, 70%, 71%, 72%, 73%, 74%, 75%, 76%, 77%, 78%, 79%, 80%, 81%, 82%, 83%, 84%, 85%, 86%, 87%, 88%, 89%, 90%, 91%, 92%, 93%, 94%, 95%, 96%, 97%, 98%, 99%, or 100%; from 27% to: 28%, 29%, 30%, 31%, 32%, 33%, 34%, 35%, 36%, 37%, 38%, 39%, 40%, 41%, 42%, 43%, 44%, 45%, 46%, 47%, 48%, 49%, 50%, 51%, 52%, 53%, 54%, 55%, 56%, 57%, 58%, 59%, 60%, 61%, 62%, 63%, 64%, 65%, 66%, 67%, 68%, 69%, 70%, 71%, 72%, 73%, 74%, 75%, 76%, 77%, 78%, 79%, 80%, 81%, 82%, 83%, 84%, 85%, 86%, 87%, 88%, 89%, 90%, 91%, 92%, 93%, 94%, 95%, 96%, 97%, 98%, 99%, or 100%; from 28% to: 29%, 30%, 31%, 32%, 33%, 34%, 35%, 36%, 37%, 38%, 39%, 40%, 41%, 42%, 43%, 44%, 45%, 46%, 47%, 48%, 49%, 50%, 51%, 52%, 53%, 54%, 55%, 56%, 57%, 58%, 59%, 60%, 61%, 62%, 63%, 64%, 65%, 66%, 67%, 68%, 69%, 70%, 71%, 72%, 73%, 74%, 75%, 76%, 77%, 78%, 79%, 80%, 81%, 82%, 83%, 84%, 85%, 86%, 87%, 88%, 89%, 90%, 91%, 92%, 93%, 94%, 95%, 96%, 97%, 98%, 99%, or 100%; from 29% to: 30%, 31%, 32%, 33%, 34%, 35%, 36%, 37%, 38%, 39%, 40%, 41%, 42%, 43%, 44%, 45%, 46%, 47%, 48%, 49%, 50%, 51%, 52%, 53%, 54%, 55%, 56%, 57%, 58%, 59%, 60%, 61%, 62%, 63%, 64%, 65%, 66%, 67%, 68%, 69%, 70%, 71%, 72%, 73%, 74%, 75%, 76%, 77%, 78%, 79%, 80%, 81%, 82%, 83%, 84%, 85%, 86%, 87%, 88%, 89%, 90%, 91%, 92%, 93%, 94%, 95%, 96%, 97%, 98%, 99%, or 100%; from 30% to: 31%, 32%, 33%, 34%, 35%, 36%, 37%, 38%, 39%, 40%, 41%, 42%, 43%, 44%, 45%, 46%, 47%, 48%, 49%, 50%, 51%, 52%, 53%, 54%, 55%, 56%, 57%, 58%, 59%, 60%, 61%, 62%, 63%, 64%, 65%, 66%, 67%, 68%, 69%, 70%, 71%, 72%, 73%, 74%, 75%, 76%, 77%, 78%, 79%, 80%, 81%, 82%, 83%, 84%, 85%, 86%, 87%, 88%, 89%, 90%, 91%, 92%, 93%, 94%, 95%, 96%, 97%, 98%, 99%, or 100%; from 31% to: 32%, 33%, 34%, 35%, 36%, 37%, 38%, 39%, 40%, 41%, 42%, 43%, 44%, 45%, 46%, 47%, 48%, 49%, 50%, 51%, 52%, 53%, 54%, 55%, 56%, 57%, 58%, 59%, 60%, 61%, 62%, 63%, 64%, 65%, 66%, 67%, 68%, 69%, 70%, 71%, 72%, 73%, 74%, 75%, 76%, 77%, 78%, 79%, 80%, 81%, 82%, 83%, 84%, 85%, 86%, 87%, 88%, 89%, 90%, 91%, 92%, 93%, 94%, 95%, 96%, 97%, 98%, 99%, or 100%; from 32% to: 33%, 34%, 35%, 36%, 37%, 38%, 39%, 40%, 41%, 42%, 43%, 44%, 45%, 46%, 47%, 48%, 49%, 50%, 51%, 52%, 53%, 54%, 55%, 56%, 57%, 58%, 59%, 60%, 61%, 62%, 63%, 64%, 65%, 66%, 67%, 68%, 69%, 70%, 71%, 72%, 73%, 74%, 75%, 76%, 77%, 78%, 79%, 80%, 81%, 82%, 83%, 84%, 85%, 86%, 87%, 88%, 89%, 90%, 91%, 92%, 93%, 94%, 95%, 96%, 97%, 98%, 99%, or 100%; from 33% to: 34%, 35%, 36%, 37%, 38%, 39%, 40%, 41%, 42%, 43%, 44%, 45%, 46%, 47%, 48%, 49%, 50%, 51%, 52%, 53%, 54%, 55%, 56%, 57%, 58%, 59%, 60%, 61%, 62%, 63%, 64%, 65%, 66%, 67%, 68%, 69%, 70%, 71%, 72%, 73%, 74%, 75%, 76%, 77%, 78%, 79%, 80%, 81%, 82%, 83%, 84%, 85%, 86%, 87%, 88%, 89%, 90%, 91%, 92%, 93%, 94%, 95%, 96%, 97%, 98%, 99%, or 100%; from 34% to: 35%, 36%, 37%, 38%, 39%, 40%, 41%, 42%, 43%, 44%, 45%, 46%, 47%, 48%, 49%, 50%, 51%, 52%, 53%, 54%, 55%, 56%, 57%, 58%, 59%, 60%, 61%, 62%, 63%, 64%, 65%, 66%, 67%, 68%, 69%, 70%, 71%, 72%, 73%, 74%, 75%, 76%, 77%, 78%, 79%, 80%, 81%, 82%, 83%, 84%, 85%, 86%, 87%, 88%, 89%, 90%, 91%, 92%, 93%, 94%, 95%, 96%, 97%, 98%, 99%, or 100%; from 35% to: 36%, 37%, 38%, 39%, 40%, 41%, 42%, 43%, 44%, 45%, 46%, 47%, 48%, 49%, 50%, 51%, 52%, 53%, 54%, 55%, 56%, 57%, 58%, 59%, 60%, 61%, 62%, 63%, 64%, 65%, 66%, 67%, 68%, 69%, 70%, 71%, 72%, 73%, 74%, 75%, 76%, 77%, 78%, 79%, 80%, 81%, 82%, 83%, 84%, 85%, 86%, 87%, 88%, 89%, 90%, 91%, 92%, 93%, 94%, 95%, 96%, 97%, 98%, 99%, or 100%; from 36% to: 37%, 38%, 39%, 40%, 41%, 42%, 43%, 44%, 45%, 46%, 47%, 48%, 49%, 50%, 51%, 52%, 53%, 54%, 55%, 56%, 57%, 58%, 59%, 60%, 61%, 62%, 63%, 64%, 65%, 66%, 67%, 68%, 69%, 70%, 71%, 72%, 73%, 74%, 75%, 76%, 77%, 78%, 79%, 80%, 81%, 82%, 83%, 84%, 85%, 86%, 87%, 88%, 89%, 90%, 91%, 92%, 93%, 94%, 95%, 96%, 97%, 98%, 99%, or 100%; from 37% to: 38%, 39%, 40%, 41%, 42%, 43%, 44%, 45%, 46%, 47%, 48%, 49%, 50%, 51%, 52%, 53%, 54%, 55%, 56%, 57%, 58%, 59%, 60%, 61%, 62%, 63%, 64%, 65%, 66%, 67%, 68%, 69%, 70%, 71%, 72%, 73%, 74%, 75%, 76%, 77%, 78%, 79%, 80%, 81%, 82%, 83%, 84%, 85%, 86%, 87%, 88%, 89%, 90%, 91%, 92%, 93%, 94%, 95%, 96%, 97%, 98%, 99%, or 100%; from 38% to: 39%, 40%, 41%, 42%, 43%, 44%, 45%, 46%, 47%, 48%, 49%, 50%, 51%, 52%, 53%, 54%, 55%, 56%, 57%, 58%, 59%, 60%, 61%, 62%, 63%, 64%, 65%, 66%, 67%, 68%, 69%, 70%, 71%, 72%, 73%, 74%, 75%, 76%, 77%, 78%, 79%, 80%, 81%, 82%, 83%, 84%, 85%, 86%, 87%, 88%, 89%, 90%, 91%, 92%, 93%, 94%, 95%, 96%, 97%, 98%, 99%, or 100%; from 39% to: 40%, 41%, 42%, 43%, 44%, 45%, 46%, 47%, 48%, 49%, 50%, 51%, 52%, 53%, 54%, 55%, 56%, 57%, 58%, 59%, 60%, 61%, 62%, 63%, 64%, 65%, 66%, 67%, 68%, 69%, 70%, 71%, 72%, 73%, 74%, 75%, 76%, 77%, 78%, 79%, 80%, 81%, 82%, 83%, 84%, 85%, 86%, 87%, 88%, 89%, 90%, 91%, 92%, 93%, 94%, 95%, 96%, 97%, 98%, 99%, or 100%; from 40% to: 41%, 42%, 43%, 44%, 45%, 46%, 47%, 48%, 49%, 50%, 51%, 52%, 53%, 54%, 55%, 56%, 57%, 58%, 59%, 60%, 61%, 62%, 63%, 64%, 65%, 66%, 67%, 68%, 69%, 70%, 71%, 72%, 73%, 74%, 75%, 76%, 77%, 78%, 79%, 80%, 81%, 82%, 83%, 84%, 85%, 86%, 87%, 88%, 89%, 90%, 91%, 92%, 93%, 94%, 95%, 96%, 97%, 98%, 99%, or 100%; from 41% to: 41%, 42%, 43%, 44%, 45%, 46%, 47%, 48%, 49%, 50%, 51%, 52%, 53%, 54%, 55%, 56%, 57%, 58%, 59%, 60%, 61%, 62%, 63%, 64%, 65%, 66%, 67%, 68%, 69%, 70%, 71%, 72%, 73%, 74%, 75%, 76%, 77%, 78%, 79%, 80%, 81%, 82%, 83%, 84%, 85%, 86%, 87%, 88%, 89%, 90%, 91%, 92%, 93%, 94%, 95%, 96%, 97%, 98%, 99%, or 100%; from 42% to: 43%, 44%, 45%, 46%, 47%, 48%, 49%, 50%, 51%, 52%, 53%, 54%, 55%, 56%, 57%, 58%, 59%, 60%, 61%, 62%, 63%, 64%, 65%, 66%, 67%, 68%, 69%, 70%, 71%, 72%, 73%, 74%, 75%, 76%, 77%, 78%, 79%, 80%, 81%, 82%, 83%, 84%, 85%, 86%, 87%, 88%, 89%, 90%, 91%, 92%, 93%, 94%, 95%, 96%, 97%, 98%, 99%, or 100%; from 43% to: 44%, 45%, 46%, 47%, 48%, 49%, 50%, 51%, 52%, 53%, 54%, 55%, 56%, 57%, 58%, 59%, 60%, 61%, 62%, 63%, 64%, 65%, 66%, 67%, 68%, 69%, 70%, 71%, 72%, 73%, 74%, 75%, 76%, 77%, 78%, 79%, 80%, 81%, 82%, 83%, 84%, 85%, 86%, 87%, 88%, 89%, 90%, 91%, 92%, 93%, 94%, 95%, 96%, 97%, 98%, 99%, or 100%; from 44% to: 45%, 46%, 47%, 48%, 49%, 50%, 51%, 52%, 53%, 54%, 55%, 56%, 57%, 58%, 59%, 60%, 61%, 62%, 63%, 64%, 65%, 66%, 67%, 68%, 69%, 70%, 71%, 72%, 73%, 74%, 75%, 76%, 77%, 78%, 79%, 80%, 81%, 82%, 83%, 84%, 85%, 86%, 87%, 88%, 89%, 90%, 91%, 92%, 93%, 94%, 95%, 96%, 97%, 98%, 99%, or 100%; from 45% to: 46%, 47%, 48%, 49%, 50%, 51%, 52%, 53%, 54%, 55%, 56%, 57%, 58%, 59%, 60%, 61%, 62%, 63%, 64%, 65%, 66%, 67%, 68%, 69%, 70%, 71%, 72%, 73%, 74%, 75%, 76%, 77%, 78%, 79%, 80%, 81%, 82%, 83%, 84%, 85%, 86%, 87%, 88%, 89%, 90%, 91%, 92%, 93%, 94%, 95%, 96%, 97%, 98%, 99%, or 100%; from 46% to: 47%, 48%, 49%, 50%, 51%, 52%, 53%, 54%, 55%, 56%, 57%, 58%, 59%, 60%, 61%, 62%, 63%, 64%, 65%, 66%, 67%, 68%, 69%, 70%, 71%, 72%, 73%, 74%, 75%, 76%, 77%, 78%, 79%, 80%, 81%, 82%, 83%, 84%, 85%, 86%, 87%, 88%, 89%, 90%, 91%, 92%, 93%, 94%, 95%, 96%, 97%, 98%, 99%, or 100%; from 47% to: 48%, 49%, 50%, 51%, 52%, 53%, 54%, 55%, 56%, 57%, 58%, 59%, 60%, 61%, 62%, 63%, 64%, 65%, 66%, 67%, 68%, 69%, 70%, 71%, 72%, 73%, 74%, 75%, 76%, 77%, 78%, 79%, 80%, 81%, 82%, 83%, 84%, 85%, 86%, 87%, 88%, 89%, 90%, 91%, 92%, 93%, 94%, 95%, 96%, 97%, 98%, 99%, or 100%; from 48% to: 49%, 50%, 51%, 52%, 53%, 54%, 55%, 56%, 57%, 58%, 59%, 60%, 61%, 62%, 63%, 64%, 65%, 66%, 67%, 68%, 69%, 70%, 71%, 72%, 73%, 74%, 75%, 76%, 77%, 78%, 79%, 80%, 81%, 82%, 83%, 84%, 85%, 86%, 87%, 88%, 89%, 90%, 91%, 92%, 93%, 94%, 95%, 96%, 97%, 98%, 99%, or 100%; from 49% to: 50%, 51%, 52%, 53%, 54%, 55%, 56%, 57%, 58%, 59%, 60%, 61%, 62%, 63%, 64%, 65%, 66%, 67%, 68%, 69%, 70%, 71%, 72%, 73%, 74%, 75%, 76%, 77%, 78%, 79%, 80%, 81%, 82%, 83%, 84%, 85%, 86%, 87%, 88%, 89%, 90%, 91%, 92%, 93%, 94%, 95%, 96%, 97%, 98%, 99%, or 100%; from 50% to: 51%, 52%, 53%, 54%, 55%, 56%, 57%, 58%, 59%, 60%, 61%, 62%, 63%, 64%, 65%, 66%, 67%, 68%, 69%, 70%, 71%, 72%, 73%, 74%, 75%, 76%, 77%, 78%, 79%, 80%, 81%, 82%, 83%, 84%, 85%, 86%, 87%, 88%, 89%, 90%, 91%, 92%, 93%, 94%, 95%, 96%, 97%, 98%, 99%, or 100%; from 51% to: 52%, 53%, 54%, 55%, 56%, 57%, 58%, 59%, 60%, 61%, 62%, 63%, 64%, 65%, 66%, 67%, 68%, 69%, 70%, 71%, 72%, 73%, 74%, 75%, 76%, 77%, 78%, 79%, 80%, 81%, 82%, 83%, 84%, 85%, 86%, 87%, 88%, 89%, 90%, 91%, 92%, 93%, 94%, 95%, 96%, 97%, 98%, 99%, or 100%; from 52% to: 53%, 54%, 55%, 56%, 57%, 58%, 59%, 60%, 61%, 62%, 63%, 64%, 65%, 66%, 67%, 68%, 69%, 70%, 71%, 72%, 73%, 74%, 75%, 76%, 77%, 78%, 79%, 80%, 81%, 82%, 83%, 84%, 85%, 86%, 87%, 88%, 89%, 90%, 91%, 92%, 93%, 94%, 95%, 96%, 97%, 98%, 99%, or 100%; from 53% to: 54%, 55%, 56%, 57%, 58%, 59%, 60%, 61%, 62%, 63%, 64%, 65%, 66%, 67%, 68%, 69%, 70%, 71%, 72%, 73%, 74%, 75%, 76%, 77%, 78%, 79%, 80%, 81%, 82%, 83%, 84%, 85%, 86%, 87%, 88%, 89%, 90%, 91%, 92%, 93%, 94%, 95%, 96%, 97%, 98%, 99%, or 100%; from 54% to: 55%, 56%, 57%, 58%, 59%, 60%, 61%, 62%, 63%, 64%, 65%, 66%, 67%, 68%, 69%, 70%, 71%, 72%, 73%, 74%, 75%, 76%, 77%, 78%, 79%, 80%, 81%, 82%, 83%, 84%, 85%, 86%, 87%, 88%, 89%, 90%, 91%, 92%, 93%, 94%, 95%, 96%, 97%, 98%, 99%, or 100%; from 55% to: 56%, 57%, 58%, 59%, 60%, 61%, 62%, 63%, 64%, 65%, 66%, 67%, 68%, 69%, 70%, 71%, 72%, 73%, 74%, 75%, 76%, 77%, 78%, 79%, 80%, 81%, 82%, 83%, 84%, 85%, 86%, 87%, 88%, 89%, 90%, 91%, 92%, 93%, 94%, 95%, 96%, 97%, 98%, 99%, or 100%; from 56% to: 57%, 58%, 59%, 60%, 61%, 62%, 63%, 64%, 65%, 66%, 67%, 68%, 69%, 70%, 71%, 72%, 73%, 74%, 75%, 76%, 77%, 78%, 79%, 80%, 81%, 82%, 83%, 84%, 85%, 86%, 87%, 88%, 89%, 90%, 91%, 92%, 93%, 94%, 95%, 96%, 97%, 98%, 99%, or 100%; from 57% to: 58%, 59%, 60%, 61%, 62%, 63%, 64%, 65%, 66%, 67%, 68%, 69%, 70%, 71%, 72%, 73%, 74%, 75%, 76%, 77%, 78%, 79%, 80%, 81%, 82%, 83%, 84%, 85%, 86%, 87%, 88%, 89%, 90%, 91%, 92%, 93%, 94%, 95%, 96%, 97%, 98%, 99%, or 100%; from 58% to: 59%, 60%, 61%, 62%, 63%, 64%, 65%, 66%, 67%, 68%, 69%, 70%, 71%, 72%, 73%, 74%, 75%, 76%, 77%, 78%, 79%, 80%, 81%, 82%, 83%, 84%, 85%, 86%, 87%, 88%, 89%, 90%, 91%, 92%, 93%, 94%, 95%, 96%, 97%, 98%, 99%, or 100%; from 59% to: 60%, 61%, 62%, 63%, 64%, 65%, 66%, 67%, 68%, 69%, 70%, 71%, 72%, 73%, 74%, 75%, 76%, 77%, 78%, 79%, 80%, 81%, 82%, 83%, 84%, 85%, 86%, 87%, 88%, 89%, 90%, 91%, 92%, 93%, 94%, 95%, 96%, 97%, 98%, 99%, or 100%; from 60% to: 61%, 62%, 63%, 64%, 65%, 66%, 67%, 68%, 69%, 70%, 71%, 72%, 73%, 74%, 75%, 76%, 77%, 78%, 79%, 80%, 81%, 82%, 83%, 84%, 85%, 86%, 87%, 88%, 89%, 90%, 91%, 92%, 93%, 94%, 95%, 96%, 97%, 98%, 99%, or 100%; from 61% to: 62%, 63%, 64%, 65%, 66%, 67%, 68%, 69%, 70%, 71%, 72%, 73%, 74%, 75%, 76%, 77%, 78%, 79%, 80%, 81%, 82%, 83%, 84%, 85%, 86%, 87%, 88%, 89%, 90%, 91%, 92%, 93%, 94%, 95%, 96%, 97%, 98%, 99%, or 100%; from 62% to: 63%, 64%, 65%, 66%, 67%, 68%, 69%, 70%, 71%, 72%, 73%, 74%, 75%, 76%, 77%, 78%, 79%, 80%, 81%, 82%, 83%, 84%, 85%, 86%, 87%, 88%, 89%, 90%, 91%, 92%, 93%, 94%, 95%, 96%, 97%, 98%, 99%, or 100%; from 63% to: 64%, 65%, 66%, 67%, 68%, 69%, 70%, 71%, 72%, 73%, 74%, 75%, 76%, 77%, 78%, 79%, 80%, 81%, 82%, 83%, 84%, 85%, 86%, 87%, 88%, 89%, 90%, 91%, 92%, 93%, 94%, 95%, 96%, 97%, 98%, 99%, or 100%; from 64% to: 65%, 66%, 67%, 68%, 69%, 70%, 71%, 72%, 73%, 74%, 75%, 76%, 77%, 78%, 79%, 80%, 81%, 82%, 83%, 84%, 85%, 86%, 87%, 88%, 89%, 90%, 91%, 92%, 93%, 94%, 95%, 96%, 97%, 98%, 99%, or 100%; from 65% to: 66%, 67%, 68%, 69%, 70%, 71%, 72%, 73%, 74%, 75%, 76%, 77%, 78%, 79%, 80%, 81%, 82%, 83%, 84%, 85%, 86%, 87%, 88%, 89%, 90%, 91%, 92%, 93%, 94%, 95%, 96%, 97%, 98%, 99%, or 100%; from 66% to: 67%, 68%, 69%, 70%, 71%, 72%, 73%, 74%, 75%, 76%, 77%, 78%, 79%, 80%, 81%, 82%, 83%, 84%, 85%, 86%, 87%, 88%, 89%, 90%, 91%, 92%, 93%, 94%, 95%, 96%, 97%, 98%, 99%, or 100%; from 67% to: 68%, 69%, 70%, 71%, 72%, 73%, 74%, 75%, 76%, 77%, 78%, 79%, 80%, 81%, 82%, 83%, 84%, 85%, 86%, 87%, 88%, 89%, 90%, 91%, 92%, 93%, 94%, 95%, 96%, 97%, 98%, 99%, or 100%; from 68% to: 69% 70%, 71%, 72%, 73%, 74%, 75%, 76%, 77%, 78%, 79%, 80%, 81%, 82%, 83%, 84%, 85%, 86%, 87%, 88%, 89%, 90%, 91%, 92%, 93%, 94%, 95%, 96%, 97%, 98%, 99%, or 100%; or from 69% to 71%, 72%, 73%, 74%, 75%, 76%, 77%, 78%, 79%, 80%, 81%, 82%, 83%, 84%, 85%, 86%, 87%, 88%, 89%, 90%, 91%, 92%, 93%, 94%, 95%, 96%, 97%, 98%, 99%, or 100%. Also contemplated and supported are combinations of the above-noted “%” of “at least” or “%” of “no more than” with the percent substitution provided in the Examples section of this document. Also contemplated and supported are combinations of the percent substitution of the Example section of this document to provide a range (i.e. the percent substitution from [the percent substitution in RNA X₁ in the Examples] to [a percent substitution from [the percent substitution in RNA X₂ in the Examples] wherein X₁ and X₂ represent any two exemplary RNA molecules of the Examples.

[0217] In some embodiments, the percentage of adenosines substituted with a adenosine-substitutable modified nucleotide are at least: 10%, 11%, 12%, 13%, 14%, 15%, 16%, 17%, 18%, 19%, 20%, 21%, 22%, 23%, 24%, 25%, 26%, 27%, 28%, 29%, 30%, 31%, 32%, 33%, 34%, 35%, 36%, 37%, 38%, 39%, 40%, 41%, 42%, 43%, 44%, 45%, 46%, 47%, 48%, 49%, 50%, 51%, 52%, 53%, 54%, 55%, 56%, 57%, 58%, 59%, 60%, 61%, 62%, 63%, 64%, 65%, 66%, 67%, 68%, 69%, 70%, 71%, 72%, 73%, 74%, 75%, 76%, 77%, 78%, 79%, 80%, 81%, 82%, 83%, 84%, 85%, 86%, 87%, 88%, 89%, 90%, 91%, 92%, 93%, 94%, 95%, 96%, 97%, 98%, 99%, or 100%. In some embodiments, the percentage of adenosines substituted with a adenosine-substitutable modified nucleotide are no more than: 80%, 79%, 78%, 77%, 76%, 75%, 74%, 73%, 72%, 71%, 70%, 69%, 68%, 67%, 66%, 65%, 64%, 63%, 62%, 61%, 60%, 59%, 58%, 57%, 56%, 55%, 54%, 53%, 52%, 51%, 50%, 49%, 48%, 47%, 46%, 45%, 44%, 43%, 42%, 41%, 40%, 39%, 38%, 37%, 36%, 35%, 34%, 33%, 32%, 31%, 30%, 29%, 28%, 27%, 26%, 25%, 24%, 23%, 22%, 21%, 20%, 19%, 18%, 17%, 16%, or 15%. Taking the above-noted embodiments into account, it is contemplated and supported that any of the above-noted “%” of “at least” and any of the above-noted “%” of “no more than” may be combined to provide an enclosed range (i.e. the percentage of adenosines substituted with a adenosine-substitutable modified nucleotide are from 25% to 75%). In some embodiments, the percentage of adenosines substituted with a adenosine-substitutable modified nucleotide are from 20% to: 21%, 22%, 23%, 24%, 25%, 26%, 27%, 28%, 29%, 30%, 31%, 32%,33%,34%,35%,36%,37%,38%,39%,40%,41%, 42%, 43%, 44%, 45%, 46%, 47%, 48%, 49%, 50%, 51%, 52%, 53%, 54%, 55%, 56%, 57%, 58%, 59%, 60%, 61%, 62%, 63%, 64%, 65%, 66%, 67%, 68%, 69%, 70%, 71%, 72%, 73%, 74%, 75%, 76%, 77%, 78%, 79%, 80%, 81%, 82%, 83%, 84%, 85%, 86%, 87%, 88%, 89%, 90%, 91%, 92%, 93%, 94%, 95%, 96%, 97%, 98%, 99%, or 100%; from 21% to: 22%, 23%, 24%, 25%, 26%, 27%, 28%, 29%, 30%, 31%, 32%, 33%,34%,35%,36%,37%,38%,39%,40%,41%, 42%, 43%, 44%, 45%, 46%, 47%, 48%, 49%, 50%, 51%, 52%, 53%, 54%, 55%, 56%, 57%, 58%, 59%, 60%, 61%, 62%, 63%, 64%, 65%, 66%, 67%, 68%, 69%, 70%, 71%, 72%, 73%, 74%, 75%, 76%, 77%, 78%, 79%, 80%, 81%, 82%, 83%, 84%, 85%, 86%, 87%, 88%, 89%, 90%, 91%, 92%, 93%, 94%, 95%, 96%, 97%, 98%, 99%, or 100%; from 22% to: 23%, 24%, 25%, 26%, 27%, 28%, 29%,30%,31%,32%,33%,34%,35%, 36%, 37%, 38%, 39%, 40%, 41%, 42%, 43%, 44%, 45%, 46%, 47%, 48%, 49%, 50%, 51%, 52%, 53%, 54%, 55%, 56%, 57%, 58%, 59%, 60%, 61%, 62%, 63%, 64%, 65%, 66%, 67%, 68%, 69%, 70%, 71%, 72%, 73%, 74%, 75%, 76%, 77%, 78%, 79%, 80%, 81%, 82%, 83%, 84%, 85%, 86%, 87%, 88%, 89%, 90%, 91%, 92%, 93%, 94%, 95%, 96%, 97%, 98%, 99%, or 100%; from 23% to: 24%, 25%, 26%, 27%, 28%, 29%, 30%, 31%, 32%, 33%, 34%, 35%, 36%, 37%, 38%, 39%, 40%, 41%, 42%, 43%, 44%, 45%, 46%, 47%, 48%, 49%, 50%, 51%, 52%, 53%, 54%, 55%, 56%, 57%, 58%, 59%, 60%, 61%, 62%, 63%, 64%, 65%, 66%, 67%, 68%, 69%, 70%, 71%, 72%, 73%, 74%, 75%, 76%, 77%, 78%, 79%, 80%, 81%, 82%, 83%, 84%, 85%, 86%, 87%, 88%, 89%, 90%, 91%, 92%, 93%, 94%, 95%, 96%, 97%, 98%, 99%, or 100%; from 24% to: 25%, 26%, 27%, 28%, 29%, 30%, 31%, 32%, 33%, 34%, 35%, 36%, 37%, 38%, 39%, 40%, 41%, 42%, 43%, 44%, 45%, 46%, 47%, 48%, 49%, 50%, 51%, 52%, 53%, 54%, 55%, 56%, 57%, 58%, 59%, 60%, 61%, 62%, 63%, 64%, 65%, 66%, 67%, 68%, 69%, 70%, 71%, 72%, 73%, 74%, 75%, 76%, 77%, 78%, 79%, 80%, 81%, 82%, 83%, 84%, 85%, 86%, 87%, 88%, 89%, 90%, 91%, 92%, 93%, 94%, 95%, 96%, 97%, 98%, 99%, or 100%; from 25% to: 26%, 27%, 28%, 29%, 30%, 31%, 32%, 33%, 34%, 35%, 36%, 37%, 38%, 39%, 40%, 41%, 42%, 43%, 44%, 45%, 46%, 47%, 48%, 49%, 50%, 51%, 52%, 53%, 54%, 55%, 56%, 57%, 58%, 59%, 60%, 61%, 62%, 63%, 64%, 65%, 66%, 67%, 68%, 69%, 70%, 71%, 72%, 73%, 74%, 75%, 76%, 77%, 78%, 79%, 80%, 81%, 82%, 83%, 84%, 85%, 86%, 87%, 88%, 89%, 90%, 91%, 92%, 93%, 94%, 95%, 96%, 97%, 98%, 99%, or 100%; from 26% to: 27%, 28%, 29%, 30%, 31%, 32%, 33%, 34%, 35%, 36%, 37%, 38%, 39%, 40%, 41%, 42%, 43%, 44%, 45%, 46%, 47%, 48%, 49%, 50%, 51%, 52%, 53%, 54%, 55%, 56%, 57%, 58%, 59%, 60%, 61%, 62%, 63%, 64%, 65%, 66%, 67%, 68%, 69%, 70%, 71%, 72%, 73%, 74%, 75%, 76%, 77%, 78%, 79%, 80%, 81%, 82%, 83%, 84%, 85%, 86%, 87%, 88%, 89%, 90%, 91%, 92%, 93%, 94%, 95%, 96%, 97%, 98%, 99%, or 100%; from 27% to: 28%, 29%,30%,31%, 32%, 33%, 34%, 35%, 36%, 37%, 38%, 39%, 40%, 41%, 42%, 43%, 44%, 45%, 46%, 47%, 48%, 49%, 50%, 51%, 52%, 53%, 54%, 55%, 56%, 57%, 58%, 59%, 60%, 61%, 62%, 63%, 64%, 65%, 66%, 67%, 68%, 69%, 70%, 71%, 72%, 73%, 74%, 75%, 76%, 77%, 78%, 79%, 80%, 81%, 82%, 83%, 84%, 85%, 86%, 87%, 88%, 89%, 90%, 91%, 92%, 93%, 94%, 95%, 96%, 97%, 98%, 99%, or 100%; from 28% to: 29%, 30%, 31%, 32%, 33%, 34%, 35%, 36%, 37%, 38%, 39%, 40%, 41%, 42%, 43%, 44%, 45%, 46%, 47%, 48%, 49%, 50%, 51%, 52%, 53%, 54%, 55%, 56%, 57%, 58%, 59%, 60%, 61%, 62%, 63%, 64%, 65%, 66%, 67%, 68%, 69%, 70%, 71%, 72%, 73%, 74%, 75%, 76%, 77%, 78%, 79%, 80%, 81%, 82%, 83%, 84%, 85%, 86%, 87%, 88%, 89%, 90%, 91%, 92%, 93%, 94%, 95%, 96%, 97%, 98%, 99%, or 100%; from 29% to: 30%, 31%, 32%, 33%, 34%, 35%, 36%, 37%, 38%, 39%, 40%, 41%, 42%, 43%, 44%, 45%, 46%, 47%, 48%, 49%, 50%, 51%, 52%, 53%, 54%, 55%, 56%, 57%, 58%, 59%, 60%, 61%, 62%, 63%, 64%, 65%, 66%, 67%, 68%, 69%, 70%, 71%, 72%, 73%, 74%, 75%, 76%, 77%, 78%, 79%, 80%, 81%, 82%, 83%, 84%, 85%, 86%, 87%, 88%, 89%, 90%, 91%, 92%, 93%, 94%, 95%, 96%, 97%, 98%, 99%, or 100%; from 30% to: 31%, 32%, 33%, 34%, 35%, 36%, 37%, 38%, 39%, 40%, 41%, 42%, 43%, 44%, 45%, 46%, 47%, 48%, 49%, 50%, 51%, 52%, 53%, 54%, 55%, 56%, 57%, 58%, 59%, 60%, 61%, 62%, 63%, 64%, 65%, 66%, 67%, 68%, 69%, 70%, 71%, 72%, 73%, 74%, 75%, 76%, 77%, 78%, 79%, 80%, 81%, 82%, 83%, 84%, 85%, 86%, 87%, 88%, 89%, 90%, 91%, 92%, 93%, 94%, 95%, 96%, 97%, 98%, 99%, or 100%; from 31% to: 32%, 33%, 34%, 35%, 36%,37%,38%,39%,40%,41%,42%,43%,44%,45%,46%,47%,48%,49%,50%,51%, 52%, 53%, 54%, 55%, 56%, 57%, 58%, 59%, 60%, 61%, 62%, 63%, 64%, 65%, 66%, 67%, 68%, 69%, 70%, 71%, 72%, 73%, 74%, 75%, 76%, 77%, 78%, 79%, 80%, 81%, 82%, 83%, 84%, 85%, 86%, 87%, 88%, 89%, 90%, 91%, 92%, 93%, 94%, 95%, 96%, 97%, 98%, 99%, or 100%; from 32% to: 33%, 34%, 35%, 36%, 37%, 38%, 39%, 40%, 41%, 42%, 43%, 44%, 45%, 46%, 47%, 48%, 49%, 50%, 51%, 52%, 53%, 54%, 55%, 56%, 57%, 58%, 59%, 60%, 61%, 62%, 63%, 64%, 65%, 66%, 67%, 68%, 69%, 70%, 71%, 72%, 73%, 74%, 75%, 76%, 77%, 78%, 79%, 80%, 81%, 82%, 83%, 84%, 85%, 86%, 87%, 88%, 89%, 90%, 91%, 92%, 93%, 94%, 95%, 96%, 97%, 98%, 99%, or 100%; from 33% to: 34%, 35%, 36%, 37%, 38%, 39%, 40%, 41%, 42%, 43%, 44%, 45%, 46%, 47%, 48%, 49%, 50%, 51%, 52%, 53%, 54%, 55%, 56%, 57%, 58%, 59%, 60%, 61%, 62%, 63%, 64%, 65%, 66%, 67%, 68%, 69%, 70%, 71%, 72%, 73%, 74%, 75%, 76%, 77%, 78%, 79%, 80%, 81%, 82%, 83%, 84%, 85%, 86%, 87%, 88%, 89%, 90%, 91%, 92%, 93%, 94%, 95%, 96%, 97%, 98%, 99%, or 100%; from 34% to: 35%, 36%, 37%, 38%, 39%, 40%, 41%, 42%, 43%, 44%, 45%, 46%, 47%, 48%, 49%, 50%, 51%, 52%, 53%, 54%, 55%, 56%, 57%, 58%, 59%, 60%, 61%, 62%, 63%, 64%, 65%, 66%, 67%, 68%, 69%, 70%, 71%, 72%, 73%, 74%, 75%, 76%, 77%, 78%, 79%, 80%, 81%, 82%, 83%, 84%, 85%, 86%, 87%, 88%, 89%, 90%, 91%, 92%, 93%, 94%, 95%, 96%, 97%, 98%, 99%, or 100%; from 35% to: 36%, 37%, 38%, 39%, 40%, 41%, 42%, 43%, 44%, 45%, 46%, 47%, 48%, 49%, 50%, 51%, 52%, 53%, 54%, 55%, 56%, 57%, 58%, 59%, 60%, 61%, 62%, 63%, 64%, 65%, 66%, 67%, 68%, 69%, 70%, 71%, 72%, 73%, 74%, 75%, 76%, 77%, 78%, 79%, 80%, 81%, 82%, 83%, 84%, 85%, 86%, 87%, 88%, 89%, 90%, 91%, 92%, 93%, 94%, 95%, 96%, 97%, 98%, 99%, or 100%; from 36% to: 37%, 38%, 39%, 40%, 41%, 42%, 43%, 44%, 45%, 46%, 47%, 48%, 49%, 50%, 51%, 52%, 53%, 54%, 55%, 56%, 57%, 58%, 59%, 60%, 61%, 62%, 63%, 64%, 65%, 66%, 67%, 68%, 69%, 70%, 71%, 72%, 73%, 74%, 75%, 76%, 77%, 78%, 79%, 80%, 81%, 82%, 83%, 84%, 85%, 86%, 87%, 88%, 89%, 90%, 91%, 92%, 93%, 94%, 95%, 96%, 97%, 98%, 99%, or 100%; from 37% to: 38%, 39%, 40%, 41%, 42%, 43%, 44%, 45%, 46%, 47%, 48%, 49%, 50%, 51%, 52%, 53%, 54%, 55%, 56%, 57%, 58%, 59%, 60%, 61%, 62%, 63%, 64%, 65%, 66%, 67%, 68%, 69%, 70%, 71%, 72%, 73%, 74%, 75%, 76%, 77%, 78%, 79%, 80%, 81%, 82%, 83%, 84%, 85%, 86%, 87%, 88%, 89%, 90%, 91%, 92%, 93%, 94%, 95%, 96%, 97%, 98%, 99%, or 100%; from 38% to: 39%, 40%, 41%, 42%, 43%, 44%, 45%, 46%, 47%, 48%, 49%, 50%, 51%, 52%, 53%, 54%, 55%, 56%, 57%, 58%, 59%, 60%, 61%, 62%, 63%, 64%, 65%, 66%, 67%, 68%, 69%, 70%, 71%, 72%, 73%, 74%, 75%, 76%, 77%, 78%, 79%, 80%, 81%, 82%, 83%, 84%, 85%, 86%, 87%, 88%, 89%, 90%, 91%, 92%, 93%, 94%, 95%, 96%, 97%, 98%, 99%, or 100%; from 39% to: 40%, 41%, 42%, 43%, 44%, 45%, 46%, 47%, 48%, 49%, 50%, 51%, 52%, 53%, 54%, 55%, 56%, 57%, 58%, 59%, 60%, 61%, 62%, 63%, 64%, 65%, 66%, 67%, 68%, 69%, 70%, 71%, 72%, 73%, 74%, 75%, 76%, 77%, 78%, 79%, 80%, 81%, 82%, 83%, 84%, 85%, 86%, 87%, 88%, 89%, 90%, 91%, 92%, 93%, 94%, 95%, 96%, 97%, 98%, 99%, or 100%; from 40% to: 41%, 42%, 43%, 44%, 45%, 46%, 47%, 48%, 49%, 50%, 51%, 52%, 53%, 54%, 55%, 56%, 57%, 58%, 59%, 60%, 61%, 62%, 63%, 64%, 65%, 66%, 67%, 68%, 69%, 70%, 71%, 72%, 73%, 74%, 75%, 76%, 77%, 78%, 79%, 80%, 81%, 82%, 83%, 84%, 85%, 86%, 87%, 88%, 89%, 90%, 91%, 92%, 93%, 94%, 95%, 96%, 97%, 98%, 99%, or 100%; from 41% to: 41%, 42%, 43%, 44%, 45%, 46%, 47%, 48%, 49%, 50%, 51%, 52%, 53%, 54%, 55%, 56%, 57%, 58%, 59%, 60%, 61%, 62%, 63%, 64%, 65%, 66%, 67%, 68%, 69%, 70%, 71%, 72%, 73%, 74%, 75%, 76%, 77%, 78%, 79%, 80%, 81%, 82%, 83%, 84%, 85%, 86%, 87%, 88%, 89%, 90%, 91%, 92%, 93%, 94%, 95%, 96%, 97%, 98%, 99%, or 100%; from 42% to: 43%, 44%, 45%, 46%, 47%, 48%, 49%, 50%, 51%, 52%, 53%, 54%, 55%, 56%, 57%, 58%, 59%, 60%, 61%, 62%, 63%, 64%, 65%, 66%, 67%, 68%, 69%, 70%, 71%, 72%, 73%, 74%, 75%, 76%, 77%, 78%, 79%, 80%, 81%, 82%, 83%, 84%, 85%, 86%, 87%, 88%, 89%, 90%, 91%, 92%, 93%, 94%, 95%, 96%, 97%, 98%, 99%, or 100%; from 43% to: 44%, 45%, 46%, 47%, 48%, 49%, 50%, 51%, 52%, 53%, 54%, 55%, 56%, 57%, 58%, 59%, 60%, 61%, 62%, 63%, 64%, 65%, 66%, 67%, 68%, 69%, 70%, 71%, 72%, 73%, 74%, 75%, 76%, 77%, 78%, 79%, 80%, 81%, 82%, 83%, 84%, 85%, 86%, 87%, 88%, 89%, 90%, 91%, 92%, 93%, 94%, 95%, 96%, 97%, 98%, 99%, or 100%; from 44% to: 45%, 46%, 47%, 48%, 49%, 50%, 51%, 52%, 53%, 54%, 55%, 56%, 57%, 58%, 59%, 60%, 61%, 62%, 63%, 64%, 65%, 66%, 67%, 68%, 69%, 70%, 71%, 72%, 73%, 74%, 75%, 76%, 77%, 78%, 79%, 80%, 81%, 82%, 83%, 84%, 85%, 86%, 87%, 88%, 89%, 90%, 91%, 92%, 93%, 94%, 95%, 96%, 97%, 98%, 99%, or 100%; from 45% to: 46%, 47%, 48%, 49%, 50%, 51%, 52%, 53%, 54%, 55%, 56%, 57%, 58%, 59%, 60%, 61%, 62%, 63%, 64%, 65%, 66%, 67%, 68%, 69%, 70%, 71%, 72%, 73%, 74%, 75%, 76%, 77%, 78%, 79%, 80%, 81%, 82%, 83%, 84%, 85%, 86%, 87%, 88%, 89%, 90%, 91%, 92%, 93%, 94%, 95%, 96%, 97%, 98%, 99%, or 100%; from 46% to: 47%, 48%, 49%, 50%, 51%, 52%, 53%, 54%, 55%, 56%, 57%, 58%, 59%, 60%, 61%, 62%, 63%, 64%, 65%, 66%, 67%, 68%, 69%, 70%, 71%, 72%, 73%, 74%, 75%, 76%, 77%, 78%, 79%, 80%, 81%, 82%, 83%, 84%, 85%, 86%, 87%, 88%, 89%, 90%, 91%, 92%, 93%, 94%, 95%, 96%, 97%, 98%, 99%, or 100%; from 47% to: 48%, 49%, 50%, 51%, 52%, 53%, 54%, 55%, 56%, 57%, 58%, 59%, 60%, 61%, 62%, 63%, 64%, 65%, 66%, 67%, 68%, 69%, 70%, 71%, 72%, 73%, 74%, 75%, 76%, 77%, 78%, 79%, 80%, 81%, 82%, 83%, 84%, 85%, 86%, 87%, 88%, 89%, 90%, 91%, 92%, 93%, 94%, 95%, 96%, 97%, 98%, 99%, or 100%; from 48% to: 49%, 50%, 51%, 52%, 53%, 54%, 55%, 56%, 57%, 58%, 59%, 60%, 61%, 62%, 63%, 64%, 65%, 66%, 67%, 68%, 69%, 70%, 71%, 72%, 73%, 74%, 75%, 76%, 77%, 78%, 79%, 80%, 81%, 82%, 83%, 84%, 85%, 86%, 87%, 88%, 89%, 90%, 91%, 92%, 93%, 94%, 95%, 96%, 97%, 98%, 99%, or 100%; from 49% to: 50%, 51%, 52%, 53%, 54%, 55%, 56%, 57%, 58%, 59%, 60%, 61%, 62%, 63%, 64%, 65%, 66%, 67%, 68%, 69%, 70%, 71%, 72%, 73%, 74%, 75%, 76%, 77%, 78%, 79%, 80%, 81%, 82%, 83%, 84%, 85%, 86%, 87%, 88%, 89%, 90%, 91%, 92%, 93%, 94%, 95%, 96%, 97%, 98%, 99%, or 100%; from 50% to: 51%, 52%, 53%, 54%, 55%, 56%, 57%, 58%, 59%, 60%, 61%, 62%, 63%, 64%, 65%, 66%, 67%, 68%, 69%, 70%, 71%, 72%, 73%, 74%, 75%, 76%, 77%, 78%, 79%, 80%, 81%, 82%, 83%, 84%, 85%, 86%, 87%, 88%, 89%, 90%, 91%, 92%, 93%, 94%, 95%, 96%, 97%, 98%, 99%, or 100%; from 51% to: 52%, 53%, 54%, 55%, 56%, 57%, 58%, 59%, 60%, 61%, 62%, 63%, 64%, 65%, 66%, 67%, 68%, 69%, 70%, 71%, 72%, 73%, 74%, 75%, 76%, 77%, 78%, 79%, 80%, 81%, 82%, 83%, 84%, 85%, 86%, 87%, 88%, 89%, 90%, 91%, 92%, 93%, 94%, 95%, 96%, 97%, 98%, 99%, or 100%; from 52% to: 53%, 54%, 55%, 56%, 57%, 58%, 59%, 60%, 61%, 62%, 63%, 64%, 65%, 66%, 67%, 68%, 69%, 70%, 71%, 72%, 73%, 74%, 75%, 76%, 77%, 78%, 79%, 80%, 81%, 82%, 83%, 84%, 85%, 86%, 87%, 88%, 89%, 90%, 91%, 92%, 93%, 94%, 95%, 96%, 97%, 98%, 99%, or 100%; from 53% to: 54%, 55%, 56%, 57%, 58%, 59%, 60%, 61%, 62%, 63%, 64%, 65%, 66%, 67%, 68%, 69%, 70%, 71%, 72%, 73%, 74%, 75%, 76%, 77%, 78%, 79%, 80%, 81%, 82%, 83%, 84%, 85%, 86%, 87%, 88%, 89%, 90%, 91%, 92%, 93%, 94%, 95%, 96%, 97%, 98%, 99%, or 100%; from 54% to: 55%, 56%, 57%, 58%, 59%, 60%, 61%, 62%, 63%, 64%, 65%, 66%, 67%, 68%, 69%, 70%, 71%, 72%, 73%, 74%, 75%, 76%, 77%, 78%, 79%, 80%, 81%, 82%, 83%, 84%, 85%, 86%, 87%, 88%, 89%, 90%, 91%, 92%, 93%, 94%, 95%, 96%, 97%, 98%, 99%, or 100%; from 55% to: 56%, 57%, 58%, 59%, 60%, 61%, 62%, 63%, 64%, 65%, 66%, 67%, 68%, 69%, 70%, 71%, 72%, 73%, 74%, 75%, 76%, 77%, 78%, 79%, 80%, 81%, 82%, 83%, 84%, 85%, 86%, 87%, 88%, 89%, 90%, 91%, 92%, 93%, 94%, 95%, 96%, 97%, 98%, 99%, or 100%; from 56% to: 57%, 58%, 59%, 60%, 61%, 62%, 63%, 64%, 65%, 66%, 67%, 68%, 69%, 70%, 71%, 72%, 73%, 74%, 75%, 76%, 77%, 78%, 79%, 80%, 81%, 82%, 83%, 84%, 85%, 86%, 87%, 88%, 89%, 90%, 91%, 92%, 93%, 94%, 95%, 96%, 97%, 98%, 99%, or 100%; from 57% to: 58%, 59%, 60%, 61%, 62%, 63%, 64%, 65%, 66%, 67%, 68%, 69%, 70%, 71%, 72%, 73%, 74%, 75%, 76%, 77%, 78%, 79%, 80%, 81%, 82%, 83%, 84%, 85%, 86%, 87%, 88%, 89%, 90%, 91%, 92%, 93%, 94%, 95%, 96%, 97%, 98%, 99%, or 100%; from 58% to: 59%, 60%, 61%, 62%, 63%, 64%, 65%, 66%, 67%, 68%, 69%, 70%, 71%, 72%, 73%, 74%, 75%, 76%, 77%, 78%, 79%, 80%, 81%, 82%, 83%, 84%, 85%, 86%, 87%, 88%, 89%, 90%, 91%, 92%, 93%, 94%, 95%, 96%, 97%, 98%, 99%, or 100%; from 59% to: 60%, 61%, 62%, 63%, 64%, 65%, 66%, 67%, 68%, 69%, 70%, 71%, 72%, 73%, 74%, 75%, 76%, 77%, 78%, 79%, 80%, 81%, 82%, 83%, 84%, 85%, 86%, 87%, 88%, 89%, 90%, 91%, 92%, 93%, 94%, 95%, 96%, 97%, 98%, 99%, or 100%; from 60% to: 61%, 62%, 63%, 64%, 65%, 66%, 67%, 68%, 69%, 70%, 71%, 72%, 73%, 74%, 75%, 76%, 77%, 78%, 79%, 80%, 81%, 82%, 83%, 84%, 85%, 86%, 87%, 88%, 89%, 90%, 91%, 92%, 93%, 94%, 95%, 96%, 97%, 98%, 99%, or 100%; from 61% to: 62%, 63%, 64%, 65%, 66%, 67%, 68%, 69%, 70%, 71%, 72%, 73%, 74%, 75%, 76%, 77%, 78%, 79%, 80%, 81%, 82%, 83%, 84%, 85%, 86%, 87%, 88%, 89%, 90%, 91%, 92%, 93%, 94%, 95%, 96%, 97%, 98%, 99%, or 100%; from 62% to: 63%, 64%, 65%, 66%, 67%, 68%, 69%, 70%, 71%, 72%, 73%, 74%, 75%, 76%, 77%, 78%, 79%, 80%, 81%, 82%, 83%, 84%, 85%, 86%, 87%, 88%, 89%, 90%, 91%, 92%, 93%, 94%, 95%, 96%, 97%, 98%, 99%, or 100%; from 63% to: 64%, 65%, 66%, 67%, 68%, 69%, 70%, 71%, 72%, 73%, 74%, 75%, 76%, 77%, 78%, 79%, 80%, 81%, 82%, 83%, 84%, 85%, 86%, 87%, 88%, 89%, 90%, 91%, 92%, 93%, 94%, 95%, 96%, 97%, 98%, 99%, or 100%; from 64% to: 65%, 66%, 67%, 68%, 69%, 70%, 71%, 72%, 73%, 74%, 75%, 76%, 77%, 78%, 79%, 80%, 81%, 82%, 83%, 84%, 85%, 86%, 87%, 88%, 89%, 90%, 91%, 92%, 93%, 94%, 95%, 96%, 97%, 98%, 99%, or 100%; from 65% to: 66%, 67%, 68%, 69%, 70%, 71%, 72%, 73%, 74%, 75%, 76%, 77%, 78%, 79%, 80%, 81%, 82%, 83%, 84%, 85%, 86%, 87%, 88%, 89%, 90%, 91%, 92%, 93%, 94%, 95%, 96%, 97%, 98%, 99%, or 100%; from 66% to: 67%, 68%, 69%, 70%, 71%, 72%, 73%, 74%, 75%, 76%, 77%, 78%, 79%, 80%, 81%, 82%, 83%, 84%, 85%, 86%, 87%, 88%, 89%, 90%, 91%, 92%, 93%, 94%, 95%, 96%, 97%, 98%, 99%, or 100%; from 67% to: 68%, 69%, 70%, 71%, 72%, 73%, 74%, 75%, 76%, 77%, 78%, 79%, 80%, 81%, 82%, 83%, 84%, 85%, 86%, 87%, 88%, 89%, 90%, 91%, 92%, 93%, 94%, 95%, 96%, 97%, 98%, 99%, or 100%; from 68% to: 69% 70%, 71%, 72%, 73%, 74%, 75%, 76%, 77%, 78%, 79%, 80%, 81%, 82%, 83%, 84%, 85%, 86%, 87%, 88%, 89%, 90%, 91%, 92%, 93%, 94%, 95%, 96%, 97%, 98%, 99%, or 100%; or from 69% to 71%, 72%, 73%, 74%, 75%, 76%, 77%, 78%, 79%, 80%, 81%, 82%, 83%, 84%, 85%, 86%, 87%, 88%, 89%, 90%, 91%, 92%, 93%, 94%, 95%, 96%, 97%, 98%, 99%, or 100%. Also contemplated and supported are combinations of the above-noted “%” of “at least” or “%” of “no more than” with the percent substitution provided in the Examples section of this document. Also contemplated and supported are combinations of the percent substitution of the Example section of this document to provide a range (i.e. the percent substitution from [the percent substitution in RNA X₁ in the Examples] to [a percent substitution from [the percent substitution in RNA X₂ in the Examples] wherein X₁ and X₂ represent any two exemplary RNA molecules of the Examples.

[0218] In some embodiments, the modified nucleotides comprise: pseudouridine; N1-methylpseudouridine; N1-ethylpseudouridine; 2-methylthio-N6-(cis-hydroxyisopentenyl)adenosine; 2-methylthio-N6-methyladenosine; 2-methylthio-N6-threonyl carbamoyladenosine; N6-glycinylcarbamoyladenosine; N6-isopentenyladenosine; N6-methyladenosine; N6-threonylcarbamoyladenosine; 1,2′-O-dimethyladenosine; 1-methyladenosine; 2′-O-methyladenosine; 2′-O-ribosyladenosine (phosphate); 2-methyladenosine; 2-methylthio-N6 isopentenyladenosine; 2-methylthio-N6-hydroxynorvalyl carbamoyladenosine; 2′-O-methyladenosine; 2′-O-ribosyladenosine (phosphate); Isopentenyladenosine; N6-(cis-hydroxyisopentenyl)adenosine; N6,2′-O-dimethyladenosine; N6,2′-O-dimethyladenosine; N6,N6,2′-O-trimethyladenosine; N6,N6-dimethyladenosine; N6-acetyladenosine; N6-hydroxynorvalylcarbamoyladenosine; N6-methyl-N6-threonylcarbamoyladenosine; 2-methyladenosine; 2-methylthio-N6-isopentenyladenosine; 7-deazaadenosine; N1-methyl-adenosine; N6,N6 (dimethyl)adenine; N6-cis-hydroxy-isopentenyladenosine; .alpha.-thio-adenosine; 2 (amino)adenine; 2 (aminopropyl)adenine; 2 (methylthio) N6 (isopentenyl)adenine; 2-(alkyl)adenine; 2-(aminoalkyl)adenine; 2-(aminopropyl)adenine; 2-(halo)adenine; 2-(halo)adenine; 2-(propyl)adenine; 2′-Amino-2′-deoxy-ATP; 2′-Azido-2′-deoxy-ATP; 2′-Deoxy-2′-a-aminoadenosine TP; 2′-Deoxy-2′-a-azidoadenosine TP; 6 (alkyl)adenine; 6 (methyl)adenine; 6-(alkyl)adenine; 6-(methyl)adenine; 7 (deaza)adenine; 8 (alkenyl)adenine; 8 (alkynyl)adenine; 8 (amino)adenine; 8 (thioalkyl)adenine; 8-(alkenyl)adenine; 8-(alkyl)adenine; 8-(alkynyl)adenine; 8-(amino)adenine; 8-(halo)adenine; 8-(hydroxyl)adenine; 8-(thioalkyl)adenine; 8-(thiol)adenine; 8-azido-adenosine; aza adenine; deaza adenine; N6 (methyl)adenine; N6-(isopentyl)adenine; 7-deaza-8-aza-adenosine; 7-methyladenine; 1-Deazaadenosine TP; 2′Fluoro-N6-Bz-deoxyadenosine TP; 2′-OMe-2-Amino-ATP; 2′O-methyl-N6-Bz-deoxyadenosine TP; 2′-a-Ethynyladenosine TP; 2-aminoadenine; 2-Aminoadenosine TP; 2-Amino-ATP; 2′-a-Trifluoromethyladenosine TP; 2-Azidoadenosine TP; 2′-b-Ethynyladenosine TP; 2-Bromoadenosine TP; 2′-b-Trifluoromethyladenosine TP; 2-Chloroadenosine TP; 2′-Deoxy-2′,2′-difluoroadenosine TP; 2′-Deoxy-2′-a-mercaptoadenosine TP; 2′-Deoxy-2′-a-thiomethoxyadenosine TP; 2′-Deoxy-2′-b-aminoadenosine TP; 2′-Deoxy-2′-b-azidoadenosine TP; 2′-Deoxy-2′-b-bromoadenosine TP; 2′-Deoxy-2′-b-chloroadenosine TP; 2′-Deoxy-2′-b-fluoroadenosine TP; 2′-Deoxy-2′-b-iodoadenosine TP; 2′-Deoxy-2′-b-mercaptoadenosine TP; 2′-Deoxy-2′-b-thiomethoxyadenosine TP; 2-Fluoroadenosine TP; 2-Iodoadenosine TP; 2-Mercaptoadenosine TP; 2-methoxy-adenine; 2-methylthio-adenine; 2-Trifluoromethyladenosine TP; 3-Deaza-3-bromoadenosine TP; 3-Deaza-3-chloroadenosine TP; 3-Deaza-3-fluoroadenosine TP; 3-Deaza-3-iodoadenosine TP; 3-Deazaadenosine TP; 4′-Azidoadenosine TP; 4′-Carbocyclic adenosine TP; 4′-Ethynyladenosine TP; 5′-Homo-adenosine TP; 8-Aza-ATP; 8-bromo-adenosine TP; 8-Trifluoromethyladenosine TP; 9-Deazaadenosine TP; 2-aminopurine; 7-deaza-2,6-diaminopurine; 7-deaza-8-aza-2,6-diaminopurine; 7-deaza-8-aza-2-aminopurine; 2,6-diaminopurine; 7-deaza-8-aza-adenine, 7-deaza-2-aminopurine; 2-thiocytidine; 3-methylcytidine; 5-formylcytidine; 5-hydroxymethylcytidine; 5-methylcytidine; N4-acetylcytidine; 2′-O-methylcytidine; 2′-O-methylcytidine; 5,2′-O-dimethylcytidine; 5-formyl-2′-O-methylcytidine; Lysidine; N4,2′-O-dimethylcytidine; N4-acetyl-2′-O-methylcytidine; N4-methylcytidine; N4,N4-Dimethyl-2′-OMe-Cytidine TP; 4-methylcytidine; 5-aza-cytidine; Pseudo-iso-cytidine; pyrrolo-cytidine; .alpha.-thio-cytidine; 2-(thio)cytosine; 2′-Amino-2′-deoxy-CTP; 2′-Azido-2′-deoxy-CTP; 2′-Deoxy-2′-a-aminocytidine TP; 2′-Deoxy-2′-a-azidocytidine TP; 3 (deaza) 5 (aza)cytosine; 3 (methyl)cytosine; 3-(alkyl)cytosine; 3-(deaza) 5 (aza)cytosine; 3-(methyl)cytidine; 4,2′-O-dimethylcytidine; 5 (halo)cytosine; 5 (methyl)cytosine; 5 (propynyl)cytosine; 5 (trifluoromethyl)cytosine; 5-(alkyl)cytosine; 5-(alkynyl)cytosine; 5-(halo)cytosine; 5-(propynyl)cytosine; 5-(trifluoromethyl)cytosine: 5-bromo-cytidine; 5-iodo-cytidine; 5-propynyl cytosine; 6-(azo)cytosine; 6-aza-cytidine; aza cytosine; deaza cytosine; N4 (acetyl)cytosine; 1-methyl-1-deaza-pseudoisocytidine; 1-methyl-pseudoisocytidine; 2-methoxy-5-methyl-cytidine: 2-methoxy-cytidine; 2-thio-5-methyl-cytidine; 4-methoxy-1-methyl-pseudoisocytidine; 4-methoxy-pseudoisocytidine; 4-thio-1-methyl-1-deaza-pseudoisocytidine; 4-thio-1-methyl-pseudoisocytidine; 4-thio-pseudoisocytidine; 5-aza-zebularine; 5-methyl-zebularine; pyrrolo-pseudoisocytidine; Zebularine; (E)-5-(2-Bromo-vinyl)cytidine TP; 2,2′-anhydro-cytidine TP hydrochloride; 2′Fluor-N4-Bz-cytidine TP; 2′Fluoro-N4-Acetyl-cytidine TP; 2′-O-Methyl-N4-Acetyl-cytidine TP; 2′O-methyl-N4-Bz-cytidine TP; 2′-a-Ethynylcytidine TP; 2′-a-Trifluoromethylcytidine TP; 2′-b-Ethynylcytidine TP; 2′-b-Trifluoromethylcytidine TP; 2′-Deoxy-2′,2′-difluorocytidine TP; 2′-Deoxy-2′-a-mercaptocytidine TP; 2′-Deoxy-2′-a-thiomethoxycytidine TP; 2′-Deoxy-2′-b-aminocytidine TP; 2′-Deoxy-2′-b-azidocytidine TP; 2′-Deoxy-2′-b-bromocytidine TP; 2′-Deoxy-2′-b-chlorocytidine TP; 2′-Deoxy-2′-b-fluorocytidine TP; 2′-Deoxy-2′-b-iodocytidine TP; 2′-Deoxy-2′-b-mercaptocytidine TP; 2′-Deoxy-2′-b-thiomethoxycytidine TP; 2′-O-Methyl-5-(1-propynyl)cytidine TP; 3′-Ethynylcytidine TP; 4′-Azidocytidine TP; 4′-Carbocyclic cytidine TP; 4′-Ethynylcytidine TP; 5-(1-Propynyl)ara-cytidine TP; 5-(2-Chloro-phenyl)-2-thiocytidine TP; 5-(4-Amino-phenyl)-2-thiocytidine TP; 5-Aminoallyl-CTP; 5-Cyanocytidine TP; 5-Ethynylara-cytidine TP; 5-Ethynylcytidine TP; 5′-Homo-cytidine TP; 5-Methoxycytidine TP; 5-Trifluoromethyl-Cytidine TP; N4-Amino-cytidine TP; N4-Benzoyl-cytidine TP; Pseudoisocytidine; 7-methylguanosine; N2,2′-O-dimethylguanosine; N2-methylguanosine; Wyosine; 1,2′-O-dimethylguanosine; 1-methylguanosine; 2′-O-methylguanosine; 2′-O-ribosylguanosine (phosphate); 2′-O-methylguanosine; 2′-O-ribosylguanosine (phosphate); 7-aminomethyl-7-deazaguanosine; 7-cyano-7-deazaguanosine; Archaeosine; Methylwyosine; N2,7-dimethylguanosine; N2,N2,2′-O-trimethylguanosine; N2,N2,7-trimethylguanosine; N2,N2-dimethylguanosine; N2,7,2′-O-trimethylguanosine; 6-thio-guanosine; 7-deaza-guanosine; 8-oxo-guanosine; N1-methyl-guanosine; .alpha.-thio-guanosine; 2 (propyl)guanine; 2-(alkyl)guanine; 2′-Amino-2′-deoxy-GTP; 2′-Azido-2′-deoxy-GTP; 2′-Deoxy-2′-a-aminoguanosine TP; 2′-Deoxy-2′-a-azidoguanosine TP; 6 (methyl)guanine; 6-(alkyl)guanine; 6-(methyl)guanine; 6-methyl-guanosine; 7 (alkyl)guanine; 7 (deaza)guanine; 7 (methyl)guanine; 7-(alkyl)guanine; 7-(deaza)guanine; 7-(methyl)guanine; 8 (alkyl)guanine; 8 (alkynyl)guanine; 8 (halo)guanine; 8 (thioalkyl)guanine; 8-(alkenyl)guanine; 8-(alkyl)guanine; 8-(alkynyl)guanine; 8-(amino)guanine; 8-(halo)guanine; 8-(hydroxyl)guanine; 8-(thioalkyl)guanine; 8-(thiol)guanine; aza guanine; deaza guanine; N (methyl)guanine; N-(methyl)guanine; 1-methyl-6-thio-guanosine; 6-methoxy-guanosine; 6-thio-7-deaza-8-aza-guanosine; 6-thio-7-deaza-guanosine; 6-thio-7-methyl-guanosine; 7-deaza-8-aza-guanosine; 7-methyl-8-oxo-guanosine; N2,N2-dimethyl-6-thio-guanosine; N2-methyl-6-thio-guanosine; 1-Me-GTP; 2′Fluoro-N2-isobutyl-guanosine TP; 2′O-methyl-N2-isobutyl-guanosine TP; 2′-a-Ethynylguanosine TP; 2′-a-Trifluoromethylguanosine TP; 2′-b-Ethynylguanosine TP; 2′-b-Trifluoromethylguanosine TP; 2′-Deoxy-2′,2′-difluoroguanosine TP; 2′-Deoxy-2′-a-mercaptoguanosine TP; 2′-Deoxy-2′-a-thiomethoxyguanosine TP; 2′-Deoxy-2′-b-aminoguanosine TP; 2′-Deoxy-2′-b-azidoguanosine TP; 2′-Deoxy-2′-b-bromoguanosine TP; 2′-Deoxy-2′-b-chloroguanosine TP; 2′-Deoxy-2′-b-fluoroguanosine TP; 2′-Deoxy-2′-b-iodoguanosine TP; 2′-Deoxy-2′-b-mercaptoguanosine TP; 2′-Deoxy-2′-b-thiomethoxyguanosine TP; 4′-Azidoguanosine TP; 4′-Carbocyclic guanosine TP; 4′-Ethynylguanosine TP; 5′-Homo-guanosine TP; 8-bromo-guanosine TP; 9-Deazaguanosine TP; N2-isobutyl-guanosine TP; 1-methylinosine; Inosine; 1,2′-O-dimethylinosine; 2′-O-methylinosine; 7-methylinosine; 2′-O-methylinosine; Epoxyqueuosine; galactosyl-queuosine; Mannosylqueuosine; Queuosine; allyamino-thymidine; aza thymidine; deaza thymidine; deoxy-thymidine; 2′-O-methyluridine; 2-thiouridine; 3-methyluridine; 5-carboxymethyluridine; 5-hydroxyuridine; 5-methyluridine; 5-taurinomethyl-2-thiouridine; 5-taurinomethyluridine; Dihydrouridine; (3-(3-amino-3-carboxypropyl)uridine; 1-methyl-3-(3-amino-5-carboxypropyl)pseudouridine; 1-methylpseduouridine; 1-methyl-pseudouridine; 2′-O-methyluridine; 2′-O-methylpseudouridine; 2′-O-methyluridine; 2-thio-2′-O-methyluridine; 3-(3-amino-3-carboxypropyl)uridine; 3,2′-O-dimethyluridine; 3-Methyl-pseudo-Uridine TP; 4-thiouridine; 5-(carboxyhydroxymethyl)uridine; 5-(carboxyhydroxymethyl)uridine methyl ester, 5,2′-O-dimethyluridine; 5,6-dihydro-uridine; 5-aminomethyl-2-thiouridine; 5-carbamoylmethyl-2′-O-methyluridine; 5-carbamoylmethyluridine; 5-carboxyhydroxymethyluridine; 5-carboxyhydroxymethyluridine methyl ester, 5-carboxymethylaminomethyl-2′-O-methyluridine; 5-carboxymethylaminomethyl-2-thiouridine; 5-carboxymethylaminomethyl-2-thiouridine; 5-caboxymethylaminomethyluridine; 5-carboxymethylaminomethyluridine; 5-Carbamoylmethyluridine TP; 5-methoxycaeoonylmethyl-2′-O-methyluridine; 5-methoxycarbonylmethyl-2-thiouridine; 5-methoxycarbonylmethyluridine; 5-methoxyuridine; 5-methyl-2-thiouridine; 5-methylaminomethyl-2-selenouridine; 5-methylaminomethyl-2-thiouridine; 5-methylaminomethyluridine; 5-Methyldihydrouridine; 5-Oxyacetic acid-Uridine TP; 5-Oxyacetic acid-methyl ester-Uridine TP; N1-methyl-pseudo-uridine; N1-ethyl-pseudo-uridine; uridine 5-oxyacetic acid; uridine 5-oxyacetic acid methyl ester; 3-(3-Amino-3-carboxypropyl)-Uridine TP; 5-(iso-Pentenylaminomethyl)-2-thiouridine TP; 5-(iso-Pentenylaminomethyl)-2′-O-methyluridine TP; 5-(iso-Pentenylaminomethyl)uridine TP; 5-propynyl uracil; .alpha.-thio-uridine; 1 (aminoalkylamino-carbonylethylenyl)-2(thio)-pseudouridine; 1 (aminoalkylaminocarbonylethylenyl)-2,4-(dithio)pseudouridine; 1 (aminoalkylaminocarbonylethylenyl)-4 (thio)pseudouridine; 1 (aminoalkylaminocarbonylethylenyl)-pseudouridine; 1 (aminocazbonylethylenyl)-2(thio)-pseudouridine; 1 (aminocarbonylethylenyl)-2,4-(dithio)pseudouridine; 1 (aminocarbonylethylenyl)-4 (thio)pseudouridine; 1 (aminocarbonylethylenyl)-pseudouridine; 1 substituted 2(thio)-pseudouridine; 1 substituted 2,4-(dithio)pseudouridine; 1 substituted 4 (thio)pseudouridine; 1 substituted pseudouridine; 1-(aminoalkylamino-carbonylethylenyl)-2-(thio)-pseudouridine; 1-Methyl-3-(3-amino-3-carboxypropyl) pseudouridine TP; 1-Methyl-3-(3-amino-3-carboxypropyl)pseudo-UTP; 1-Methyl-pseudo-UTP; 2 (thio)pseudouridine; 2′ deoxy uridine; 2′ fluorouridine; 2-(thio)uracil; 2,4-(dithio)psuedouracil; 2′ methyl, 2′amino, 2′azido, 2′fluoro-guanosine; 2′-Amino-2′-deoxy-UTP; 2′-Azido-2′-deoxy-UTP; 2′-Azido-deoxyuridine TP; 2′-O-methylpseudouridine; 2′ deoxy uridine; 2′ fluorouridine; 2′-Deoxy-2′-a-aminouridine TP; 2′-Deoxy-2′-a-azidouridine TP; 2-methylpseudouridine; 3 (3 amino-3 carboxypropyl)uracil; 4 (thio)pseudouridine; 4-(thio)pseudouridine; 4-(thio)uracil; 4-thiouracil; 5 (1,3-diazole-1-alkyl)uracil; 5 (2-aminopropyl)uracil; 5 (aminoalkyl)uracil; 5 (dimethylaminoalkyl)uracil; 5 (guanidiniumalkyl)uracil; 5 (methoxycarbonylmethyl)-2-(thio)uracil; 5 (methoxycarbonyl-methyl)uracil; 5 (methyl) 2 (thio)uracil; 5 (methyl) 2,4 (dithio)uracil; 5 (methyl) 4 (thio)uracil; 5 (methylaminomethyl)-2 (thio)uracil; 5 (methylaminomethyl)-2,4 (dithio)uracil; 5 (methylaminomethyl)-4 (thio)uracil; 5 (propynyl)uracil; 5 (trifluoromethyl)uracil; 5-(2-aminopropyl)uracil; 5-(alkyl)-2-(thio)pseudouridine; 5-(alkyl)-2,4 (dithio)pseudouridine; 5-(alkyl)-4 (thio)pseudouridine; 5-(alkyl)pseudouridine; 5-(alkyl)uracil; 5-(alkynyl)uracil; 5-(allylamino)uracil; 5-(cyanoalkyl)uracil; 5-(dialkylaminoalkyl)uracil; 5-(dimethylaminoalkyl)uracil; 5-(guanidiniumalkyl)uracil; 5-(halo)uracil; 5-(1,3-diazole-1-alkyl)uracil; 5-(methoxy)uracil; 5-(methoxycarbonylmethyl)-2-(thio)uracil; 5-(methoxycarbonyl-methyl)uracil; 5-(methyl) 2(thio)uracil; 5-(methyl) 2,4 (dithio)uracil; 5-(methyl) 4 (thio)uracil; 5-(methyl)-2-(thio)pseudouridine; 5-(methyl)-2,4 (dithio)pseudouridine; 5-(methyl)-4 (thio)pseudouridine; 5-(methyl)pseudouridine; 5-(methylaminomethyl)-2 (thio)uracil; 5-(methylaminomethyl)-2,4(dithio)uracil; 5-(methylaminomethyl)-4-(thio)uracil; 5-(propynyl)uracil; 5-(trifluoromethyl)uracil; 5-aminoallyl-uridine; 5-bromo-uridine; 5-iodo-uridine; 5-uracil; 6 (azo)uracil; 6-(azo)uracil; 6-aza-uridine; allyamino-uracil; aza uracil; deaza uracil; N3 (methyl)uracil; Pseudo-UTP-1-2-ethanoic acid; Pseudouridine; 4-Thio-pseudo-UTP; 1-carboxymethyl-pseudouridine; 1-methyl-1-deaza-pseudouridine; 1-propynyl-uridine; 1-taurinomethyl-1-methyl-uridine; 1-taurinomethyl-4-thio-uridine; 1-taurinomethyl-pseudouridine; 2-methoxy-4-thio-pseudouridine; 2-thio-1-methyl-1-deaza-pseudouridine; 2-thio-1-methyl-pseudouridine; 2-thio-5-aza-uridine; 2-thio-dihydropseudouridine; 2-thio-dihydrouridine; 2-thio-pseudouridine; 4-methoxy-2-thio-pseudouridine; 4-methoxy-pseudouridine; 4-thio-1-methyl-pseudouridine; 4-thio-pseudouridine; 5-aza-uridine; Dihydropseudouridine; (.+−.)1-(2-Hydroxypropyl)pseudouridine TP; (2R)-1-(2-Hydroxypropyl)pseudouridine TP; (2S)-1-(2-Hydroxypropyl)pseudouridine TP; (E)-5-(2-Bromo-vinyl)ara-uridine TP; (E)-5-(2-Bromo-vinyl)uridine TP; (Z)-5-(2-Bromo-vinyl)ara-uridine TP; (Z)-5-(2-Bromo-vinyl)uridine TP; 1-(2,2,2-Trifluoroethyl)-pseudo-UTP; 1-(2,2,3,3,3-Pentafluoropropyl)pseudouridine TP; 1-(2,2-Diethoxyethyl)pseudouridine TP; 1-(2,4,6-Trimethylbenzyl)pseudouridine TP; 1-(2,4,6-Trimethyl-benzyl)pseudo-UTP; 1-(2,4,6-Trimethyl-phenyl)pseudo-UTP; 1-(2-Amino-2-carboxyethyl)pseudo-UTP; 1-(2-Amino-ethyl)pseudo-UTP; 1-(2-Hydroxyethyl)pseudouridine TP; 1-(2-Methoxyethyl)pseudouridine TP; 1-(3,4-Bis-trifluoromethoxybenzyl)pseudouridine TP; 1-(3,4-Dimethoxybenzyl)pseudouridine TP; 1-(3-Amino-3-carboxypropyl)pseudo-UTP; 1-(3-Amino-propyl)pseudo-UTP; 1-(3-Cyclopropyl-prop-2-ynyl)pseudouridine TP; 1-(4-Amino-4-carboxybutyl)pseudo-UTP; 1-(4-Amino-benzyl)pseudo-UTP; 1-(4-Amino-butyl)pseudo-UTP; 1-(4-Amino-phenyl)pseudo-UTP; 1-(4-Azidobenzyl)pseudouridine TP; 1-(4-Bromobenzyl)pseudouridine TP; 1-(4-Chlorobenzyl)pseudouridine TP; 1-(4-Fluorobenzyl)pseudouridine TP; 1-(4-Iodobenzyl)pseudouridine TP; 1-(4-Methanesulfonylbenzyl)pseudouridine TP; 1-(4-Methoxybenzyl)pseudouridine TP; 1-(4-Methoxy-benzyl)pseudo-UTP; 1-(4-Methoxy-phenyl)pseudo-UTP; 1-(4-Methylbenzyl)pseudouridine TP; 1-(4-Methyl-benzyl)pseudo-UTP; 1-(4-Nitrobenzyl)pseudouridine TP; 1-(4-Nitro-benzyl)pseudo-UTP; 1-(4-Nitro-phenyl)pseudo-UTP; 1-(4-Thiomethoxybenzyl)pseudouridine TP; 1-(4-Trifluoromethoxybenzyl)pseudouridine TP; 1-(4-Trifluoromethylbenzyl)pseudouridine TP; 1-(5-Amino-pentyl)pseudo-UTP; 1-(6-Amino-hexyl)pseudo-UTP; 1,6-Dimethyl-pseudo-UTP; 1-[3-(2-{2-[2-(2-Aminoethoxy)-ethoxy]-ethoxy}-ethoxy)-propionyl]pseudouri-dine TP; 1-{3-[2-(2-Aminoethoxy)-ethoxy]-propionyl}pseudouridine TP; 1-Acetylpseudouridine TP; I-Alkyl-6-(1-propynyl)-pseudo-UTP; 1-Alkyl-6-(2-propynyl)-pseudo-UTP; 1-Alkyl-6-allyl-pseudo-UTP; 1-Alkyl-6-ethynyl-pseudo-UTP; 1-Alkyl-6-homoallyl-pseudo-UTP; 1-Alkyl-6-vinyl-pseudo-UTP; 1-Allylpseudouridine TP; 1-Aminomethyl-pseudo-UTP; 1-Benzoylpseudouridine TP; 1-Benzyloxymethylpseudouridine TP; 1-Benzyl-pseudo-UTP; 1-Biotinyl-PEG2-pseudouridine TP; 1-Biotinylpseudouridine TP; 1-Butyl-pseudo-UTP; 1-Cyanomethylpseudouridine TP; 1-Cyclobutylmethyl-pseudo-UTP; 1-Cyclobutyl-pseudo-UTP; 1-Cycloheptylmethyl-pseudo-UTP; 1-Cycloheptyl-pseudo-UTP; 1-Cyclohexylmethyl-pseudo-UTP; 1-Cyclohexyl-pseudo-UTP; 1-Cyclooctylmethyl-pseudo-UTP; 1-Cyclooctyl-pseudo-UTP; 1-Cyclopentylmethyl-pseudo-UTP; 1-Cyclopentyl-pseudo-UTP; 1-Cyclopropylmethyl-pseudo-UTP; 1-Cyclopropyl-pseudo-UTP; 1-Ethyl-pseudo-UTP; 1-Hexyl-pseudo-UTP; 1-Homoallylpseudouridine TP; 1-Hydroxymethylpseudouridine TP; 1-iso-propyl-pseudo-UTP; 1-Me-2-thio-pseudo-UTP; 1-Me-4-thio-pseudo-UTP; 1-Me-alpha-thio-pseudo-UTP; 1-Methanesulfonylmethylpseudouridine TP; 1-Methoxymethylpseudouridine TP; 1-Methyl-6-(2,2,2-Trifluoroethyl)pseudo-UTP; 1-Methyl-6-(4-morpholino)-pseudo-UTP; 1-Methyl-6-(4-thiomorpholino)-pseudo-UTP; 1-Methyl-6-(substituted phenyl)pseudo-UTP; 1-Methyl-6-amino-pseudo-UTP; 1-Methyl-6-azido-pseudo-UTP; 1-Methyl-6-bromo-pseudo-UTP; 1-Methyl-6-butyl-pseudo-UTP; 1-Methyl-6-chloro-pseudo-UTP; 1-Methyl-6-cyano-pseudo-UTP; 1-Methyl-6-dimethylamino-pseudo-UTP; 1-Methyl-6-ethoxy-pseudo-UTP; 1-Methyl-6-ethylcarboxylate-pseudo-UTP; 1-Methyl-6-ethyl-pseudo-UTP; 1-Methyl-6-fluoro-pseudo-UTP; 1-Methyl-6-formyl-pseudo-UTP; 1-Methyl-6-hydroxyamino-pseudo-UTP; 1-Methyl-6-hydroxy-pseudo-UTP; 1-Methyl-6-iodo-pseudo-UTP; 1-Methyl-6-iso-propyl-pseudo-UTP; 1-Methyl-6-methoxy-pseudo-UTP; 1-Methyl-6-methylamino-pseudo-UTP; 1-Methyl-6-phenyl-pseudo-UTP; 1-Methyl-6-propyl-pseudo-UTP; 1-Methyl-6-tert-butyl-pseudo-UTP; 1-Methyl-6-trifluoromethoxy-pseudo-UTP; 1-Methyl-6-trifluoromethyl-pseudo-UTP; 1-Morpholinomethylpseudouridine TP; 1-Pentyl-pseudo-UTP; 1-Phenyl-pseudo-UTP; 1-Pivaloylpseudouridine TP; 1-Propargylpseudouridine TP; 1-Propyl-pseudo-UTP; 1-propynyl-pseudouridine; 1-p-tolyl-pseudo-UTP; 1-tert-Butyl-pseudo-UTP; 1-Thiomethoxymethylpseudouridine TP; 1-Thiomorpholinomethylpseudouridine TP; 1-Trifluoroacetylpseudouridine TP; 1-Trifluoromethyl-pseudo-UTP; 1-Vinylpseudouridine TP; 2,2′-anhydro-uridine TP; 2′-bromo-deoxyuridine TP; 2′-F-5-Methyl-2′-deoxy-UTP; 2′-OMe-5-Me-UTP; 2′-OMe-pseudo-UTP; 2′-a-Ethynyluridine TP; 2′-a-Trifluoromethyluridine TP; 2′-b-Ethynyluridine TP; 2′-b-Trifluoromethyluridine TP; 2′-Deoxy-2′,2′-difluorouridine TP; 2′-Deoxy-2′-a-mercaptouridine TP; 2′-Deoxy-2′-a-thiomethoxyuridine TP; 2′-Deoxy-2′-b-aminouridine TP; 2′-Deoxy-2′-b-azidouridine TP; 2′-Deoxy-2′-b-bromouridine TP; 2′-Deoxy-2′-b-chlorouridine TP; 2′-Deoxy-2′-b-fluorouridine TP; 2′-Deoxy-2′-b-iodouridine TP; 2′-Deoxy-2′-b-mercaptouridine TP; 2′-Deoxy-2′-b-thiomethoxyuridine TP; 2-methoxy-4-thio-uridine; 2-methoxyuridine; 2′-O-Methyl-5-(1-propynyl)uridine TP; 3-Alkyl-pseudo-UTP; 4′-Azidouridine TP; 4′-Carbocyclic uridine TP; 4′-Ethynyluridine TP; 5-(1-Propynyl)ara-uridine TP; 5-(2-Furanyl)uridine TP; 5-Cyanouridine TP; 5-Dimethylaminouridine TP; 5′-Homo-uridine TP; 5-iodo-2′-fluoro-deoxyuridine TP; 5-Phenylethynyluridine TP; 5-Trideuteromethyl-6-deuterouridine TP; 5-Trifluoromethyl-Uridine TP; 5-Vinylarauridine TP; 6-(2,2,2-Trifluoroethyl)-pseudo-UTP; 6-(4-Morpholino)-pseudo-UTP; 6-(4-Thiomorpholino)-pseudo-UTP; 6-(Substituted-Phenyl)-pseudo-UTP; 6-Amino-pseudo-UTP; 6-Azido-pseudo-UTP; 6-Bromo-pseudo-UTP; 6-Butyl-pseudo-UTP; 6-Chloro-pseudo-UTP; 6-Cyano-pseudo-UTP; 6-Dimethylamino-pseudo-UTP; 6-Ethoxy-pseudo-UTP; 6-Ethylcarboxylate-pseudo-UTP; 6-Ethyl-pseudo-UTP; 6-Fluoro-pseudo-UTP; 6-Formyl-pseudo-UTP; 6-Hydroxyamino-pseudo-UTP; 6-Hydroxy-pseudo-UTP; 6-Iodo-pseudo-UTP; 6-iso-Propyl-pseudo-UTP; 6-Methoxy-pseudo-UTP; 6-Methylamino-pseudo-UTP; 6-Methyl-pseudo-UTP; 6-Phenyl-pseudo-UTP; 6-Phenyl-pseudo-UTP; 6-Propyl-pseudo-UTP; 6-tert-Butyl-pseudo-UTP; 6-Trifluoromethoxy-pseudo-UTP; 6-Trifluoromethyl-pseudo-UTP; Alpha-thio-pseudo-UTP; Pseudouridine 1-(4-methylbenzenesulfonic acid) TP; Pseudouridine 1-(4-methylbenzoic acid) TP; Pseudouridine TP 1-[3-(2-ethoxy)]propionic acid; Pseudouridine TP 1-[3-{2-(2-[2-(2-ethoxy)-ethoxy]-ethoxy)-ethoxy}]propionic acid; Pseudouridine TP 1-[3-{2-(2-[2-{2-(2-ethoxy)-ethoxy)-ethoxy}-ethoxy]-ethoxy}]propionic acid; Pseudouridine TP 1-[3-{2-(2-[2-ethoxy]-ethoxy)-ethoxy}]propionic acid; Pseudouridine TP 1-[3-{2-(2-ethoxy)-ethoxy}]propionic acid; Pseudouridine TP 1-methylphosphonic acid; Pseudouridine TP 1-methylphosphonic acid diethyl ester; Pseudo-UTP-N1-3-propionic acid; Pseudo-UTP-N1-4-butanoic acid; Pseudo-UTP-N1-5-pentanoic acid; Pseudo-UTP-N1-6-hexanoic acid; Pseudo-UTP-N1-7-heptanoic acid; Pseudo-UTP-N1-methyl-p-benzoic acid; Pseudo-UTP-N1-p-benzoic acid; Wybutosine; Hydroxywybutosine; Isowyosine; Peroxywybutosine; undermodified hydroxywybutosine; 4-demethylwyosine; 2,6-(diamino)purine; 1-(aza)-2-(thio)-3-(aza)-phenoxazin-1-yl: 1,3-(diaza)-2-(oxo)-phenthiazin-1-yl; 1,3-(diaza)-2-(oxo)-phenoxazin-1-yl; 1,3,5-(triaza)-2,6-(dioxa)-naphthalene; 2 (amino)purine; 2,4,5-(trimethyl)phenyl; 2′ methyl, 2′amino, 2′azido, 2′fluoro-cytidine; 2′ methyl, 2′amino, 2′azido, 2′fluoro-adenine; 2′methyl, 2′amino, 2′azido, 2′fluoro-uridine; 2′-amino-2′-deoxyribose; 2-amino-6-Chloro-purine; 2-aza-inosinyl; 2′-azido-2′-deoxyribose; 2′fluoro-2′-deoxyribose; 2′-fluoro-modified bases; 2′-O-methyl-ribose; 2-oxo-7-aminopyridopyrimidin-3-yl; 2-oxo-pyridopyrimidine-3-yl; 2-pyridinone; 3 nitropyrrole; 3-(methyl)-7-(propynyl)isocarbostyrilyl; 3-(methyl)isocarbostyrilyl; 4-(fluoro)-6-(methyl)benzimidazole; 4-(methyl)benzimidazole; 4-(methyl)indolyl; 4,6-(dimethyl)indolyl; 5 nitroindole; 5 substituted pyrimidines; 5-(methyl)isocarbostyrilyl; 5-nitroindole; 6-(aza)pyrimidine; 6-(azo)thymine; 6-(methyl)-7-(aza)indolyl; 6-chloro-purine; 6-phenyl-pyrrolo-pyrimidin-2-on-3-yl; 7-(aminoalkylhydroxy)-1-(aza)-2-(thio)-3-(aza)-phenthiazin-1-yl; 7-(aminoalkylhydroxy)-1-(aza)-2-(thio)-3-(aza)-phenoxazin-1-yl; 7-(aminoalkylhydroxy)-1,3-(diaza)-2-(oxo)-phenoxazin-1-yl; 7-(aminoalkylhydroxy)-1,3-(diaza)-2-(oxo)-phenthiazin-1-yl; 7-(aminoalkylhydroxy)-1,3-(diaza)-2-(oxo)-phenoxazin-1-yl; 7-(aza)indolyl; 7-(guanidiniumalkylhydroxy)-1-(aza)-2-(thio)-3-(aza)-phenoxazinl-yl; 7-(guanidiniumalkylhydroxy)-1-(aza)-2-(thio)-3-(aza)-phenthiazin-1-yl; 7-(guanidiniumalkylhydroxy)-1-(aza)-2-(thio)-3-(aza)-phenoxazin-1-yl; 7-(guanidiniumalkylhydroxy)-1,3-(diaza)-2-(oxo)-phenoxazin-1-yl; 7-(guanidiniumalkyl-hydroxy)-1,3-(diaza)-2-(oxo)-phenthiazin-1-yl; 7-(guanidiniumalkylhydroxy)-1,3-(diaza)-2-(oxo)-phenoxazin-1-yl; 7-(propynyl)isocarbostyrilyl; 7-(propynyl)isocarbostyrilyl, propynyl-7-(aza)indolyl; 7-deaza-inosinyl; 7-substituted 1-(aza)-2-(thio)-3-(aza)-phenoxazin-1-yl; 7-substituted 1,3-(diaza)-2-(oxo)-phenoxazin-1-yl; 9-(methyl)-imidizopyridinyl; Aminoindolyl; Anthracenyl; bis-ortho-(aminoalkylhydroxy)-6-phenyl-pyrrolo-pyrimidin-2-on-3-yl; bis-ortho-substituted-6-phenyl-pyrrolo-pyrimidin-2-on-3-yl; Difluorotolyl; Hypoxanthine; Imidizopyridinyl; Inosinyl; Isocarbostyrilyl; Isoguanisine; N2-substituted purines; N6-methyl-2-amino-purine; N6-substituted purines; N-alkylated derivative; Napthalenyl; Nitrobenzimidazolyl; Nitroimidazolyl; Nitroindazolyl; Nitropyrazolyl; Nubularine; 06-substituted purines; O-alkylated derivative; ortho-(aminoalkylhydroxy)-6-phenyl-pyrrolo-pyrimidin-2-on-3-yl; ortho-substituted-6-phenyl-pyrrolo-pyrimidin-2-on-3-yl; Oxoformycin TP; para-(aminoalkylhydroxy)-6-phenyl-pyrrolo-pyrimidin-2-on-3-yl; para-substituted-6-phenyl-pyrrolo-pyrimidin-2-on-3-yl; Pentacenyl; Phenanthracenyl; Phenyl; propynyl-7-(aza)indolyl; Pyrenyl; pyridopyrimidin-3-yl; pyridopyrimidin-3-yl, 2-oxo-7-amino-pyridopyrimidin-3-yl; pyrrolo-pyrimidin-2-on-3-yl; Pyrrolopyrimidinyl; Pyrrolopyrizinyl; Stilbenzyl; substituted 1,2,4-triazoles; Tetracenyl; Tubercidine; Xanthine; Xanthosine-5′-TP; 2-thio-zebularine; 5-aza-2-thio-zebularine; 7-deaza-2-amino-purine; pyridin-4-one ribonucleoside; 2-Amino-riboside-TP; Formycin A TP; Formycin B TP; Pyrrolosine TP; 2′-OH-ara-adenosine TP; 2′-OH-ara-cytidine TP; 2′-OH-ara-uridine TP; 2′-OH-ara-guanosine TP; 5-(2-carbomethoxyvinyl)uridine TP; or N6-(19-Amino-pentaoxanonadecyl)adenosine TP.

[0219] In some embodiments, the adenosine-substitutable modified nucleotides comprise: 2-methylthio-N6-(cis-hydroxyisopentenyl)adenosine; 2-methylthio-N6-methyladenosine; 2-methylthio-N6-threonyl carbamoyladenosine; N6-glycinylcarbamoyladenosine; N6-isopentenyladenosine; N6-methyladenosine; N6-threonylcarbamoyladenosine; 1,2′-O-dimethyladenosine; 1-methyladenosine; 2′-O-methyladenosine; 2′-O-ribosyladenosine (phosphate); 2-methyladenosine; 2-methylthio-N6 isopentenyladenosine; 2-methylthio-N6-hydroxynorvalyl carbamoyladenosine; 2′-O-methyladenosine; 2′-O-ribosyladenosine (phosphate); Isopentenyladenosine; N6-(cis-hydroxyisopentenyl)adenosine; N6,2′-O-dimethyladenosine; N6,2′-O-dimethyladenosine; N6,N6,2′-O-trimethyladenosine; N6,N6-dimethyladenosine; N6-acetyladenosine; N6-hydroxynorvalylcarbamoyladenosine; N6-methyl-N6-threonylcarbamoyladenosine; 2-methyladenosine; 2-methylthio-N6-isopentenyladenosine; 7-deazaadenosine; N1-methyl-adenosine; N6,N6 (dimethyl)adenine; N6-cis-hydroxy-isopentenyl-adenosine; .alpha.-thio-adenosine; 2 (amino)adenine; 2 (aminopropyl)adenine; 2 (methylthio) N6 (isopentenyl)adenine; 2-(alkyl)adenine; 2-(aminoalkyl)adenine; 2-(aminopropyl)adenine; 2-(halo)adenine; 2-(halo)adenine; 2-(propyl)adenine; 2′-Amino-2′-deoxy-ATP; 2′-Azido-2′-deoxy-ATP; 2′-Deoxy-2′-a-aminoadenosine TP; 2′-Deoxy-2′-a-azidoadenosine TP; 6 (alkyl)adenine; 6 (methyl)adenine; 6-(alkyl)adenine; 6-(methyl)adenine; 7 (deaza)adenine; 8 (alkenyl)adenine; 8 (alkynyl)adenine; 8 (amino)adenine; 8 (thioalkyl)adenine; 8-(alkenyl)adenine; 8-(alkyl)adenine; 8-(alkynyl)adenine; 8-(amino)adenine; 8-(halo)adenine; 8-(hydroxyl)adenine; 8-(thioalkyl)adenine; 8-(thiol)adenine; 8-azido-adenosine; aza adenine; deaza adenine; N6 (methyl)adenine; N6-(isopentyl)adenine; 7-deaza-8-aza-adenosine; 7-methyladenine; 1-Deazaadenosine TP; 2′Fluoro-N6-Bz-deoxyadenosine TP; 2′-OMe-2-Amino-ATP; 2′O-methyl-N6-Bz-deoxyadenosine TP; 2′-a-Ethynyladenosine TP; 2-aminoadenine; 2-Aminoadenosine TP; 2-Amino-ATP; 2′-a-Trifluoromethyladenosine TP; 2-Azidoadenosine TP; 2′-b-Ethynyladenosine TP; 2-Bromoadenosine TP; 2′-b-Trifluoromethyladenosine TP; 2-Chloroadenosine TP; 2′-Deoxy-2′,2′-difluoroadenosine TP; 2′-Deoxy-2′-a-mercaptoadenosine TP; 2′-Deoxy-2′-a-thiomethoxyadenosine TP; 2′-Deoxy-2′-b-aminoadenosine TP; 2′-Deoxy-2′-b-azidoadenosine TP; 2′-Deoxy-2′-b-bromoadenosine TP; 2′-Deoxy-2′-b-chloroadenosine TP; 2′-Deoxy-2′-b-fluoroadenosine TP; 2′-Deoxy-2′-b-iodoadenosine TP; 2′-Deoxy-2′-b-mercaptoadenosine TP; 2′-Deoxy-2′-b-thiomethoxyadenosine TP; 2-Fluoroadenosine TP; 2-Iodoadenosine TP; 2-Mercaptoadenosine TP; 2-methoxy-adenine; 2-methylthio-adenine; 2-Trifluoromethyladenosine TP; 3-Deaza-3-bromoadenosine TP; 3-Deaza-3-chloroadenosine TP; 3-Deaza-3-fluoroadenosine TP; 3-Deaza-3-iodoadenosine TP; 3-Deazaadenosine TP; 4′-Azidoadenosine TP; 4′-Carbocyclic adenosine TP; 4′-Ethynyladenosine TP; 5′-Homo-adenosine TP; 8-Aza-ATP; 8-bromo-adenosine TP; 8-Trifluoromethyladenosine TP; 9-Deazaadenosine TP; Wybutosine; Hydroxywybutosine; Isowyosine; Peroxywybutosine; undermodified hydroxywybutosine; 4-demethylwyosine; 2,6-(diamino)purine; 1-(aza)-2-(thio)-3-(aza)-phenoxazin-1-yl: 1,3-(diaza)-2-(oxo)-phenthiazin-1-yl; 1,3-(diaza)-2-(oxo)-phenoxazin-1-yl; 1,3,5-(triaza)-2,6-(dioxa)-naphthalene; 2 (amino)purine; 2,4,5-(trimethyl)phenyl; 2′ methyl, 2′amino, 2′azido, 2′fluoro-cytidine; 2′ methyl, 2′amino, 2′azido, 2′fluoro-adenine; 2′methyl, 2′amino, 2′azido, 2′fluoro-uridine; 2′-amino-2′-deoxyribose; 2-amino-6-Chloro-purine; 2-aza-inosinyl; 2′-azido-2′-deoxyribose; 2′fluoro-2′-deoxyribose; 2′-fluoro-modified bases; 2′-O-methyl-ribose; 2-oxo-7-aminopyridopyrimidin-3-yl; 2-oxo-pyridopyrimidine-3-yl; 2-pyridinone; 3 nitropyrrole; 3-(methyl)-7-(propynyl)isocarbostyrilyl; 3-(methyl)isocarbostyrilyl; 4-(fluoro)-6-(methyl)benzimidazole; 4-(methyl)benzimidazole; 4-(methyl)indolyl; 4,6-(dimethyl)indolyl; 5 nitroindole; 5 substituted pyrimidines; 5-(methyl)isocarbostyrilyl; 5-nitroindole; 6-(aza)pyrimidine; 6-(azo)thymine; 6-(methyl)-7-(aza)indolyl; 6-chloro-purine; 6-phenyl-pyrrolo-pyrimidin-2-on-3-yl; 7-(aminoalkylhydroxy)-1-(aza)-2-(thio)-3-(aza)-phenthiazin-1-yl; 7-(aminoalkylhydroxy)-1-(aza)-2-(thio)-3-(aza)-phenoxazin-1-yl; 7-(aminoalkylhydroxy)-1,3-(diaza)-2-(oxo)-phenoxazin-1-yl; 7-(aminoalkylhydroxy)-1,3-(diaza)-2-(oxo)-phenthiazin-1-yl; 7-(aminoalkylhydroxy)-1,3-(diaza)-2-(oxo)-phenoxazin-1-yl; 7-(aza)indolyl; 7-(guanidiniumalkylhydroxy)-1-(aza)-2-(thio)-3-(aza)-phenoxazinl-yl; 7-(guanidiniumalkylhydroxy)-1-(aza)-2-(thio)-3-(aza)-phenthiazin-1-yl; 7-(guanidiniumalkylhydroxy)-1-(aza)-2-(thio)-3-(aza)-phenoxazin-1-yl; 7-(guanidiniumalkylhydroxy)-1,3-(diaza)-2-(oxo)-phenoxazin-1-yl; 7-(guanidiniumalkyl-hydroxy)-1,3-(diaza)-2-(oxo)-phenthiazin-1-yl; 7-(guanidiniumalkylhydroxy)-1,3-(diaza)-2-(oxo)-phenoxazin-1-yl; 7-(propynyl)isocarbostyrilyl; 7-(propynyl)isocarbostyrilyl, propynyl-7-(aza)indolyl; 7-deaza-inosinyl; 7-substituted 1-(aza)-2-(thio)-3-(aza)-phenoxazin-1-yl; 7-substituted 1,3-(diaza)-2-(oxo)-phenoxazin-1-yl; 9-(methyl)-imidizopyridinyl; Aminoindolyl; Anthracenyl; bis-ortho-(aminoalkylhydroxy)-6-phenyl-pyrrolo-pyrimidin-2-on-3-yl; bis-ortho-substituted-6-phenyl-pyrrolo-pyrimidin-2-on-3-yl; Difluorotolyl; Hypoxanthine; Imidizopyridinyl; Inosinyl; Isocarbostyrilyl; Isoguanisine; N2-substituted purines; N6-methyl-2-amino-purine; N6-substituted purines; N-alkylated derivative; Napthalenyl; Nitrobenzimidazolyl; Nitroimidazolyl; Nitroindazolyl; Nitropyrazolyl; Nubularine; 06-substituted purines; O-alkylated derivative; ortho-(aminoalkylhydroxy)-6-phenyl-pyrrolo-pyrimidin-2-on-3-yl; ortho-substituted-6-phenyl-pyrrolo-pyrimidin-2-on-3-yl; Oxoformycin TP; para-(aminoalkylhydroxy)-6-phenyl-pyrrolo-pyrimidin-2-on-3-yl; para-substituted-6-phenyl-pyrrolo-pyrimidin-2-on-3-yl; Pentacenyl; Phenanthracenyl; Phenyl; propynyl-7-(aza)indolyl; Pyrenyl; pyridopyrimidin-3-yl; pyridopyrimidin-3-yl, 2-oxo-7-amino-pyridopyrimidin-3-yl; pyrrolo-pyrimidin-2-on-3-yl; Pyrrolopyrimidinyl; Pyrrolopyrizinyl; Stilbenzyl; substituted 1,2,4-triazoles; Tetracenyl; Tubercidine; Xanthine; Xanthosine-5′-TP; 2-thio-zebularine; 5-aza-2-thio-zebularine; 7-deaza-2-amino-purine; pyridin-4-one ribonucleoside; 2-Amino-riboside-TP; Formycin A TP; Formycin B TP; Pyrrolosine TP; 2′-OH-ara-adenosine TP; 2′-OH-ara-cytidine TP; 2′-OH-ara-uridine TP; 2′-OH-ara-guanosine TP; 5-(2-carbomethoxyvinyl)uridine TP; or N6-(19-Amino-pentaoxanonadecyl)adenosine TP.

[0220] In some embodiments, the uridine-substitutable modified nucleotides or the thymidine-substitutable modified nucleotides comprise: pseudouridine; N1-methylpseudouridine; N1-ethylpseudouridine; Inosine; 1,2′-O-dimethylinosine; 2′-O-methylinosine; 7-methylinosine; 2′-O-methylinosine; Epoxyqueuosine; galactosyl-queuosine; Mannosylqueuosine; Queuosine; allyamino-thymidine; aza thymidine; deaza thymidine; deoxy-thymidine; 2′-O-methyluridine; 2-thiouridine; 3-methyluridine; 5-carboxymethyluridine; 5-hydroxyuridine; 5-methyluridine; 5-taurinomethyl-2-thiouridine; 5-taurinomethyluridine; Dihydrouridine; (3-(3-amino-3-carboxypropyl)uridine; 1-methyl-3-(3-amino-5-carboxypropyl)pseudouridine; 1-methylpseduouridine; 1-methyl-pseudouridine; 2′-O-methyluridine; 2′-O-methylpseudouridine; 2′-O-methyluridine; 2-thio-2′-O-methyluridine; 3-(3-amino-3-carboxypropyl)uridine; 3,2′-O-dimethyluridine; 3-Methyl-pseudo-Uridine TP; 4-thiouridine; 5-(carboxyhydroxymethyl)uridine; 5-(carboxyhydroxymethyl)uridine methyl ester, 5,2′-O-dimethyluridine; 5,6-dihydro-uridine; 5-aminomethyl-2-thiouridine; 5-carbamoylmethyl-2′-O-methyluridine; 5-carbamoylmethyluridine; 5-carboxyhydroxymethyluridine; 5-carboxyhydroxymethyluridine methyl ester, 5-carboxymethylaminomethyl-2′-O-methyluridine; 5-carboxymethylaminomethyl-2-thiouridine; 5-carboxymethylaminomethyl-2-thiouridine; 5-caboxymethylaminomethyluridine; 5-carboxymethylaminomethyluridine; 5-Carbamoylmethyluridine TP; 5-methoxycaeoonylmethyl-2′-O-methyluridine; 5-methoxycarbonylmethyl-2-thiouridine; 5-methoxycarbonylmethyluridine; 5-methoxyuridine; 5-methyl-2-thiouridine; 5-methylaminomethyl-2-selenouridine; 5-methylaminomethyl-2-thiouridine; 5-methylaminomethyluridine; 5-Methyldihydrouridine; 5-Oxyacetic acid-Uridine TP; 5-Oxyacetic acid-methyl ester-Uridine TP; N1-methyl-pseudo-uridine; N1-ethyl-pseudo-uridine; uridine 5-oxyacetic acid; uridine 5-oxyacetic acid methyl ester; 3-(3-Amino-3-carboxypropyl)-Uridine TP; 5-(iso-Pentenylaminomethyl)-2-thiouridine TP; 5-(iso-Pentenylaminomethyl)-2′-O-methyluridine TP; 5-(iso-Pentenylaminomethyl)uridine TP; 5-propynyl uracil; .alpha.-thio-uridine; 1 (aminoalkylamino-carbonylethylenyl)-2(thio)-pseudouridine; 1 (aminoalkylaminocarbonylethylenyl)-2,4-(dithio)pseudouridine; 1 (aminoalkylaminocarbonylethylenyl)-4 (thio)pseudouridine; 1 (aminoalkylaminocarbonylethylenyl)-pseudouridine; 1 (aminocazbonylethylenyl)-2(thio)-pseudouridine; 1 (aminocarbonylethylenyl)-2,4-(dithio)pseudouridine; 1 (aminocarbonylethylenyl)-4 (thio)pseudouridine; 1 (aminocarbonylethylenyl)-pseudouridine; 1 substituted 2(thio)-pseudouridine; 1 substituted 2,4-(dithio)pseudouridine; 1 substituted 4 (thio)pseudouridine; 1 substituted pseudouridine; 1-(aminoalkylamino-carbonylethylenyl)-2-(thio)-pseudouridine; 1-Methyl-3-(3-amino-3-carboxypropyl) pseudouridine TP; 1-Methyl-3-(3-amino-3-carboxypropyl)pseudo-UTP; 1-Methyl-pseudo-UTP; 2 (thio)pseudouridine; 2′ deoxy uridine; 2′ fluorouridine; 2-(thio)uracil; 2,4-(dithio)psuedouracil; 2′ methyl, 2′amino, 2′azido, 2′fluoro-guanosine; 2′-Amino-2′-deoxy-UTP; 2′-Azido-2′-deoxy-UTP; 2′-Azido-deoxyuridine TP; 2′-O-methylpseudouridine; 2′ deoxy uridine; 2′ fluorouridine; 2′-Deoxy-2′-a-aminouridine TP; 2′-Deoxy-2′-a-azidouridine TP; 2-methylpseudouridine; 3 (3 amino-3 carboxypropyl)uracil; 4 (thio)pseudouridine; 4-(thio)pseudouridine; 4-(thio)uracil; 4-thiouracil; 5 (1,3-diazole-1-alkyl)uracil; 5 (2-aminopropyl)uracil; 5 (aminoalkyl)uracil; 5 (dimethylaminoalkyl)uracil; 5 (guanidiniumalkyl)uracil; 5 (methoxycarbonylmethyl)-2-(thio)uracil; 5 (methoxycarbonyl-methyl)uracil; 5 (methyl) 2 (thio)uracil; 5 (methyl) 2,4 (dithio)uracil; 5 (methyl) 4 (thio)uracil; 5 (methylaminomethyl)-2 (thio)uracil; 5 (methylaminomethyl)-2,4 (dithio)uracil; 5 (methylaminomethyl)-4 (thio)uracil; 5 (propynyl)uracil; 5 (trifluoromethyl)uracil; 5-(2-aminopropyl)uracil; 5-(alkyl)-2-(thio)pseudouridine; 5-(alkyl)-2,4 (dithio)pseudouridine; 5-(alkyl)-4 (thio)pseudouridine; 5-(alkyl)pseudouridine; 5-(alkyl)uracil; 5-(alkynyl)uracil; 5-(allylamino)uracil; 5-(cyanoalkyl)uracil; 5-(dialkylaminoalkyl)uracil; 5-(dimethylaminoalkyl)uracil; 5-(guanidiniumalkyl)uracil; 5-(halo)uracil; 5-(1,3-diazole-1-alkyl)uracil; 5-(methoxy)uracil; 5-(methoxycarbonylmethyl)-2-(thio)uracil; 5-(methoxycarbonyl-methyl)uracil; 5-(methyl) 2(thio)uracil; 5-(methyl) 2,4 (dithio)uracil; 5-(methyl) 4 (thio)uracil; 5-(methyl)-2-(thio)pseudouridine; 5-(methyl)-2,4 (dithio)pseudouridine; 5-(methyl)-4 (thio)pseudouridine; 5-(methyl)pseudouridine; 5-(methylaminomethyl)-2 (thio)uracil; 5-(methylaminomethyl)-2,4(dithio)uracil; 5-(methylaminomethyl)-4-(thio)uracil; 5-(propynyl)uracil; 5-(trifluoromethyl)uracil; 5-aminoallyl-uridine; 5-bromo-uridine; 5-iodo-uridine; 5-uracil; 6 (azo)uracil; 6-(azo)uracil; 6-aza-uridine; allyamino-uracil; aza uracil; deaza uracil; N3 (methyl)uracil; Pseudo-UTP-1-2-ethanoic acid; Pseudouridine; 4-Thio-pseudo-UTP; 1-carboxymethyl-pseudouridine; 1-methyl-1-deaza-pseudouridine; 1-propynyl-uridine; 1-taurinomethyl-1-methyl-uridine; 1-taurinomethyl-4-thio-uridine; 1-taurinomethyl-pseudouridine; 2-methoxy-4-thio-pseudouridine; 2-thio-1-methyl-1-deaza-pseudouridine; 2-thio-1-methyl-pseudouridine; 2-thio-5-aza-uridine; 2-thio-dihydropseudouridine; 2-thio-dihydrouridine; 2-thio-pseudouridine; 4-methoxy-2-thio-pseudouridine; 4-methoxy-pseudouridine; 4-thio-1-methyl-pseudouridine; 4-thio-pseudouridine; 5-aza-uridine; Dihydropseudouridine; (.+−.)1-(2-Hydroxypropyl)pseudouridine TP; (2R)-1-(2-Hydroxypropyl)pseudouridine TP; (2S)-1-(2-Hydroxypropyl)pseudouridine TP; (E)-5-(2-Bromo-vinyl)ara-uridine TP; (E)-5-(2-Bromo-vinyl)uridine TP; (Z)-5-(2-Bromo-vinyl)ara-uridine TP; (Z)-5-(2-Bromo-vinyl)uridine TP; 1-(2,2,2-Trifluoroethyl)-pseudo-UTP; 1-(2,2,3,3,3-Pentafluoropropyl)pseudouridine TP; 1-(2,2-Diethoxyethyl)pseudouridine TP; 1-(2,4,6-Trimethylbenzyl)pseudouridine TP; 1-(2,4,6-Trimethyl-benzyl)pseudo-UTP; 1-(2,4,6-Trimethyl-phenyl)pseudo-UTP; 1-(2-Amino-2-carboxyethyl)pseudo-UTP; 1-(2-Amino-ethyl)pseudo-UTP; 1-(2-Hydroxyethyl)pseudouridine TP; 1-(2-Methoxyethyl)pseudouridine TP; 1-(3,4-Bis-trifluoromethoxybenzyl)pseudouridine TP; 1-(3,4-Dimethoxybenzyl)pseudouridine TP; 1-(3-Amino-3-carboxypropyl)pseudo-UTP; 1-(3-Amino-propyl)pseudo-UTP; 1-(3-Cyclopropyl-prop-2-ynyl)pseudouridine TP; 1-(4-Amino-4-carboxybutyl)pseudo-UTP; 1-(4-Amino-benzyl)pseudo-UTP; 1-(4-Amino-butyl)pseudo-UTP; 1-(4-Amino-phenyl)pseudo-UTP; 1-(4-Azidobenzyl)pseudouridine TP; 1-(4-Bromobenzyl)pseudouridine TP; 1-(4-Chlorobenzyl)pseudouridine TP; 1-(4-Fluorobenzyl)pseudouridine TP; 1-(4-Iodobenzyl)pseudouridine TP; 1-(4-Methanesulfonylbenzyl)pseudouridine TP; 1-(4-Methoxybenzyl)pseudouridine TP; 1-(4-Methoxy-benzyl)pseudo-UTP; 1-(4-Methoxy-phenyl)pseudo-UTP; 1-(4-Methylbenzyl)pseudouridine TP; 1-(4-Methyl-benzyl)pseudo-UTP; 1-(4-Nitrobenzyl)pseudouridine TP; 1-(4-Nitro-benzyl)pseudo-UTP; 1-(4-Nitro-phenyl)pseudo-UTP; 1-(4-Thiomethoxybenzyl)pseudouridine TP; 1-(4-Trifluoromethoxybenzyl)pseudouridine TP; 1-(4-Trifluoromethylbenzyl)pseudouridine TP; 1-(5-Amino-pentyl)pseudo-UTP; 1-(6-Amino-hexyl)pseudo-UTP; 1,6-Dimethyl-pseudo-UTP; 1-[3-(2-{2-[2-(2-Aminoethoxy)-ethoxy]-ethoxy}-ethoxy)-propionyl]pseudouri-dine TP; 1-{3-[2-(2-Aminoethoxy)-ethoxy]-propionyl}pseudouridine TP; 1-Acetylpseudouridine TP; I-Alkyl-6-(1-propynyl)-pseudo-UTP; 1-Alkyl-6-(2-propynyl)-pseudo-UTP; 1-Alkyl-6-allyl-pseudo-UTP; 1-Alkyl-6-ethynyl-pseudo-UTP; 1-Alkyl-6-homoallyl-pseudo-UTP; 1-Alkyl-6-vinyl-pseudo-UTP; 1-Allylpseudouridine TP; 1-Aminomethyl-pseudo-UTP; 1-Benzoylpseudouridine TP; 1-Benzyloxymethylpseudouridine TP; 1-Benzyl-pseudo-UTP; 1-Biotinyl-PEG2-pseudouridine TP; 1-Biotinylpseudouridine TP; 1-Butyl-pseudo-UTP; 1-Cyanomethylpseudouridine TP; 1-Cyclobutylmethyl-pseudo-UTP; 1-Cyclobutyl-pseudo-UTP; 1-Cycloheptylmethyl-pseudo-UTP; 1-Cycloheptyl-pseudo-UTP; 1-Cyclohexylmethyl-pseudo-UTP; 1-Cyclohexyl-pseudo-UTP; 1-Cyclooctylmethyl-pseudo-UTP; 1-Cyclooctyl-pseudo-UTP; 1-Cyclopentylmethyl-pseudo-UTP; 1-Cyclopentyl-pseudo-UTP; 1-Cyclopropylmethyl-pseudo-UTP; 1-Cyclopropyl-pseudo-UTP; 1-Ethyl-pseudo-UTP; 1-Hexyl-pseudo-UTP; 1-Homoallylpseudouridine TP; 1-Hydroxymethylpseudouridine TP; 1-iso-propyl-pseudo-UTP; 1-Me-2-thio-pseudo-UTP; 1-Me-4-thio-pseudo-UTP; 1-Me-alpha-thio-pseudo-UTP; 1-Methanesulfonylmethylpseudouridine TP; 1-Methoxymethylpseudouridine TP; 1-Methyl-6-(2,2,2-Trifluoroethyl)pseudo-UTP; 1-Methyl-6-(4-morpholino)-pseudo-UTP; 1-Methyl-6-(4-thiomorpholino)-pseudo-UTP; 1-Methyl-6-(substituted phenyl)pseudo-UTP; 1-Methyl-6-amino-pseudo-UTP; 1-Methyl-6-azido-pseudo-UTP; 1-Methyl-6-bromo-pseudo-UTP; 1-Methyl-6-butyl-pseudo-UTP; 1-Methyl-6-chloro-pseudo-UTP; 1-Methyl-6-cyano-pseudo-UTP; 1-Methyl-6-dimethylamino-pseudo-UTP; 1-Methyl-6-ethoxy-pseudo-UTP; 1-Methyl-6-ethylcarboxylate-pseudo-UTP; 1-Methyl-6-ethyl-pseudo-UTP; 1-Methyl-6-fluoro-pseudo-UTP; 1-Methyl-6-formyl-pseudo-UTP; 1-Methyl-6-hydroxyamino-pseudo-UTP; 1-Methyl-6-hydroxy-pseudo-UTP; 1-Methyl-6-iodo-pseudo-UTP; 1-Methyl-6-iso-propyl-pseudo-UTP; 1-Methyl-6-methoxy-pseudo-UTP; 1-Methyl-6-methylamino-pseudo-UTP; 1-Methyl-6-phenyl-pseudo-UTP; 1-Methyl-6-propyl-pseudo-UTP; 1-Methyl-6-tert-butyl-pseudo-UTP; 1-Methyl-6-trifluoromethoxy-pseudo-UTP; 1-Methyl-6-trifluoromethyl-pseudo-UTP; 1-Morpholinomethylpseudouridine TP; 1-Pentyl-pseudo-UTP; 1-Phenyl-pseudo-UTP; 1-Pivaloylpseudouridine TP; 1-Propargylpseudouridine TP; 1-Propyl-pseudo-UTP; 1-propynyl-pseudouridine; 1-p-tolyl-pseudo-UTP; 1-tert-Butyl-pseudo-UTP; 1-Thiomethoxymethylpseudouridine TP; 1-Thiomorpholinomethylpseudouridine TP; 1-Trifluoroacetylpseudouridine TP; 1-Trifluoromethyl-pseudo-UTP; 1-Vinylpseudouridine TP; 2,2′-anhydro-uridine TP; 2′-bromo-deoxyuridine TP; 2′-F-5-Methyl-2′-deoxy-UTP; 2′-OMe-5-Me-UTP; 2′-OMe-pseudo-UTP; 2′-a-Ethynyluridine TP; 2′-a-Trifluoromethyluridine TP; 2′-b-Ethynyluridine TP; 2′-b-Trifluoromethyluridine TP; 2′-Deoxy-2′,2′-difluorouridine TP; 2′-Deoxy-2′-a-mercaptouridine TP; 2′-Deoxy-2′-a-thiomethoxyuridine TP; 2′-Deoxy-2′-b-aminouridine TP; 2′-Deoxy-2′-b-azidouridine TP; 2′-Deoxy-2′-b-bromouridine TP; 2′-Deoxy-2′-b-chlorouridine TP; 2′-Deoxy-2′-b-fluorouridine TP; 2′-Deoxy-2′-b-iodouridine TP; 2′-Deoxy-2′-b-mercaptouridine TP; 2′-Deoxy-2′-b-thiomethoxyuridine TP; 2-methoxy-4-thio-uridine; 2-methoxyuridine; 2′-O-Methyl-5-(1-propynyl)uridine TP; 3-Alkyl-pseudo-UTP; 4′-Azidouridine TP; 4′-Carbocyclic uridine TP; 4′-Ethynyluridine TP; 5-(1-Propynyl)ara-uridine TP; 5-(2-Furanyl)uridine TP; 5-Cyanouridine TP; 5-Dimethylaminouridine TP; 5′-Homo-uridine TP; 5-iodo-2′-fluoro-deoxyuridine TP; 5-Phenylethynyluridine TP; 5-Trideuteromethyl-6-deuterouridine TP; 5-Trifluoromethyl-Uridine TP; 5-Vinylarauridine TP; 6-(2,2,2-Trifluoroethyl)-pseudo-UTP; 6-(4-Morpholino)-pseudo-UTP; 6-(4-Thiomorpholino)-pseudo-UTP; 6-(Substituted-Phenyl)-pseudo-UTP; 6-Amino-pseudo-UTP; 6-Azido-pseudo-UTP; 6-Bromo-pseudo-UTP; 6-Butyl-pseudo-UTP; 6-Chloro-pseudo-UTP; 6-Cyano-pseudo-UTP; 6-Dimethylamino-pseudo-UTP; 6-Ethoxy-pseudo-UTP; 6-Ethylcarboxylate-pseudo-UTP; 6-Ethyl-pseudo-UTP; 6-Fluoro-pseudo-UTP; 6-Formyl-pseudo-UTP; 6-Hydroxyamino-pseudo-UTP; 6-Hydroxy-pseudo-UTP; 6-Iodo-pseudo-UTP; 6-iso-Propyl-pseudo-UTP; 6-Methoxy-pseudo-UTP; 6-Methylamino-pseudo-UTP; 6-Methyl-pseudo-UTP; 6-Phenyl-pseudo-UTP; 6-Phenyl-pseudo-UTP; 6-Propyl-pseudo-UTP; 6-tert-Butyl-pseudo-UTP; 6-Trifluoromethoxy-pseudo-UTP; 6-Trifluoromethyl-pseudo-UTP; Alpha-thio-pseudo-UTP; Pseudouridine 1-(4-methylbenzenesulfonic acid) TP; Pseudouridine 1-(4-methylbenzoic acid) TP; Pseudouridine TP 1-[3-(2-ethoxy)]propionic acid; Pseudouridine TP 1-[3-{2-(2-[2-(2-ethoxy)-ethoxy]-ethoxy)-ethoxy}]propionic acid; Pseudouridine TP 1-[3-{2-(2-[2-{2-(2-ethoxy)-ethoxy)-ethoxy}-ethoxy]-ethoxy}]propionic acid; Pseudouridine TP 1-[3-{2-(2-[2-ethoxy]-ethoxy)-ethoxy}]propionic acid; Pseudouridine TP 1-[3-{2-(2-ethoxy)-ethoxy}]propionic acid; Pseudouridine TP 1-methylphosphonic acid; Pseudouridine TP 1-methylphosphonic acid diethyl ester; Pseudo-UTP-N1-3-propionic acid; Pseudo-UTP-N1-4-butanoic acid; Pseudo-UTP-N1-5-pentanoic acid; Pseudo-UTP-N1-6-hexanoic acid; Pseudo-UTP-N1-7-heptanoic acid; Pseudo-UTP-N1-methyl-p-benzoic acid; Pseudo-UTP-N1-p-benzoic acid; Wybutosine; Hydroxywybutosine; Isowyosine; Peroxywybutosine; undermodified hydroxywybutosine; 4-demethylwyosine; 2,6-(diamino)purine; 1-(aza)-2-(thio)-3-(aza)-phenoxazin-1-yl: 1,3-(diaza)-2-(oxo)-phenthiazin-1-yl; 1,3-(diaza)-2-(oxo)-phenoxazin-1-yl; 1,3,5-(triaza)-2,6-(dioxa)-naphthalene; 2 (amino)purine; 2,4,5-(trimethyl)phenyl; 2′ methyl, 2′amino, 2′azido, 2′fluoro-cytidine; 2′ methyl, 2′amino, 2′azido, 2′fluoro-adenine; 2′methyl, 2′amino, 2′azido, 2′fluoro-uridine; 2′-amino-2′-deoxyribose; 2-amino-6-Chloro-purine; 2-aza-inosinyl; 2′-azido-2′-deoxyribose; 2′fluoro-2′-deoxyribose; 2′-fluoro-modified bases; 2′-O-methyl-ribose; 2-oxo-7-aminopyridopyrimidin-3-yl; 2-oxo-pyridopyrimidine-3-yl; 2-pyridinone; 3 nitropyrrole; 3-(methyl)-7-(propynyl)isocarbostyrilyl; 3-(methyl)isocarbostyrilyl; 4-(fluoro)-6-(methyl)benzimidazole; 4-(methyl)benzimidazole; 4-(methyl)indolyl; 4,6-(dimethyl)indolyl; 5 nitroindole; 5 substituted pyrimidines; 5-(methyl)isocarbostyrilyl; 5-nitroindole; 6-(aza)pyrimidine; 6-(azo)thymine; 6-(methyl)-7-(aza)indolyl; 6-chloro-purine; 6-phenyl-pyrrolo-pyrimidin-2-on-3-yl; 7-(aminoalkylhydroxy)-1-(aza)-2-(thio)-3-(aza)-phenthiazin-1-yl; 7-(aminoalkylhydroxy)-1-(aza)-2-(thio)-3-(aza)-phenoxazin-1-yl; 7-(aminoalkylhydroxy)-1,3-(diaza)-2-(oxo)-phenoxazin-1-yl; 7-(aminoalkylhydroxy)-1,3-(diaza)-2-(oxo)-phenthiazin-1-yl; 7-(aminoalkylhydroxy)-1,3-(diaza)-2-(oxo)-phenoxazin-1-yl; 7-(aza)indolyl; 7-(guanidiniumalkylhydroxy)-1-(aza)-2-(thio)-3-(aza)-phenoxazinl-yl; 7-(guanidiniumalkylhydroxy)-1-(aza)-2-(thio)-3-(aza)-phenthiazin-1-yl; 7-(guanidiniumalkylhydroxy)-1-(aza)-2-(thio)-3-(aza)-phenoxazin-1-yl; 7-(guanidiniumalkylhydroxy)-1,3-(diaza)-2-(oxo)-phenoxazin-1-yl; 7-(guanidiniumalkyl-hydroxy)-1,3-(diaza)-2-(oxo)-phenthiazin-1-yl; 7-(guanidiniumalkylhydroxy)-1,3-(diaza)-2-(oxo)-phenoxazin-1-yl; 7-(propynyl)isocarbostyrilyl; 7-(propynyl)isocarbostyrilyl, propynyl-7-(aza)indolyl; 7-deaza-inosinyl; 7-substituted 1-(aza)-2-(thio)-3-(aza)-phenoxazin-1-yl; 7-substituted 1,3-(diaza)-2-(oxo)-phenoxazin-1-yl; 9-(methyl)-imidizopyridinyl; Aminoindolyl; Anthracenyl; bis-ortho-(aminoalkylhydroxy)-6-phenyl-pyrrolo-pyrimidin-2-on-3-yl; bis-ortho-substituted-6-phenyl-pyrrolo-pyrimidin-2-on-3-yl; Difluorotolyl; Hypoxanthine; Imidizopyridinyl; Inosinyl; Isocarbostyrilyl; N2-substituted purines; N6-methyl-2-amino-purine; N6-substituted purines; N-alkylated derivative; Napthalenyl; Nitrobenzimidazolyl; Nitroimidazolyl; Nitroindazolyl; Nitropyrazolyl; Nubularine; 06-substituted purines; O-alkylated derivative; ortho-(aminoalkylhydroxy)-6-phenyl-pyrrolo-pyrimidin-2-on-3-yl; ortho-substituted-6-phenyl-pyrrolo-pyrimidin-2-on-3-yl; Oxoformycin TP; para-(aminoalkylhydroxy)-6-phenyl-pyrrolo-pyrimidin-2-on-3-yl; para-substituted-6-phenyl-pyrrolo-pyrimidin-2-on-3-yl; Pentacenyl; Phenanthracenyl; Phenyl; propynyl-7-(aza)indolyl; Pyrenyl; pyridopyrimidin-3-yl; pyridopyrimidin-3-yl, 2-oxo-7-amino-pyridopyrimidin-3-yl; pyrrolo-pyrimidin-2-on-3-yl; Pyrrolopyrimidinyl; Pyrrolopyrizinyl; Stilbenzyl; substituted 1,2,4-triazoles; Tetracenyl; Tubercidine; Xanthine; Xanthosine-5′-TP; 2-thio-zebularine; 5-aza-2-thio-zebularine; 7-deaza-2-amino-purine; pyridin-4-one ribonucleoside; 2-Amino-riboside-TP; Formycin A TP; Formycin B TP; Pyrrolosine TP; 2′-OH-ara-cytidine TP; 2′-OH-ara-uridine TP TP; or 5-(2-carbomethoxyvinyl)uridine TP.

[0221] In some embodiments, the cytosine-substitutable modified nucleotides comprise 2-thiocytidine; 3-methylcytidine; 5-formylcytidine; 5-hydroxymethylcytidine; 5-methylcytidine; N4-acetylcytidine; 2′-O-methylcytidine; 2′-O-methylcytidine; 5,2′-O-dimethylcytidine; 5-formyl-2′-O-methylcytidine; Lysidine; N4,2′-O-dimethylcytidine; N4-acetyl-2′-O-methylcytidine; N4-methylcytidine; N4,N4-Dimethyl-2′-OMe-Cytidine TP; 4-methylcytidine; 5-aza-cytidine; Pseudo-iso-cytidine; pyrrolo-cytidine; .alpha.-thio-cytidine; 2-(thio)cytosine; 2′-Amino-2′-deoxy-CTP; 2′-Azido-2′-deoxy-CTP; 2′-Deoxy-2′-a-aminocytidine TP; 2′-Deoxy-2′-a-azidocytidine TP; 3 (deaza) 5 (aza)cytosine; 3 (methyl)cytosine; 3-(alkyl)cytosine; 3-(deaza) 5 (aza)cytosine; 3-(methyl)cytidine; 4,2′-O-dimethylcytidine; 5 (halo)cytosine; 5 (methyl)cytosine; 5 (propynyl)cytosine; 5 (trifluoromethyl)cytosine; 5-(alkyl)cytosine; 5-(alkynyl)cytosine; 5-(halo)cytosine; 5-(propynyl)cytosine; 5-(trifluoromethyl)cytosine: 5-bromo-cytidine; 5-iodo-cytidine; 5-propynyl cytosine; 6-(azo)cytosine; 6-aza-cytidine; aza cytosine; deaza cytosine; N4 (acetyl)cytosine; 1-methyl-1-deaza-pseudoisocytidine; 1-methyl-pseudoisocytidine; 2-methoxy-5-methyl-cytidine: 2-methoxy-cytidine; 2-thio-5-methyl-cytidine; 4-methoxy-1-methyl-pseudoisocytidine; 4-methoxy-pseudoisocytidine; 4-thio-1-methyl-1-deaza-pseudoisocytidine; 4-thio-1-methyl-pseudoisocytidine; 4-thio-pseudoisocytidine; 5-aza-zebularine; 5-methyl-zebularine; pyrrolo-pseudoisocytidine; Zebularine; (E)-5-(2-Bromo-vinyl)cytidine TP; 2,2′-anhydro-cytidine TP hydrochloride; 2′Fluor-N4-Bz-cytidine TP; 2′Fluoro-N4-Acetyl-cytidine TP; 2′-O-Methyl-N4-Acetyl-cytidine TP; 2′O-methyl-N4-Bz-cytidine TP; 2′-a-Ethynylcytidine TP; 2′-a-Trifluoromethylcytidine TP; 2′-b-Ethynylcytidine TP; 2′-b-Trifluoromethylcytidine TP; 2′-Deoxy-2′,2′-difluorocytidine TP; 2′-Deoxy-2′-a-mercaptocytidine TP; 2′-Deoxy-2′-a-thiomethoxycytidine TP; 2′-Deoxy-2′-b-aminocytidine TP; 2′-Deoxy-2′-b-azidocytidine TP; 2′-Deoxy-2′-b-bromocytidine TP; 2′-Deoxy-2′-b-chlorocytidine TP; 2′-Deoxy-2′-b-fluorocytidine TP; 2′-Deoxy-2′-b-iodocytidine TP; 2′-Deoxy-2′-b-mercaptocytidine TP; 2′-Deoxy-2′-b-thiomethoxycytidine TP; 2′-O-Methyl-5-(1-propynyl)cytidine TP; 3′-Ethynylcytidine TP; 4′-Azidocytidine TP; 4′-Carbocyclic cytidine TP; 4′-Ethynylcytidine TP; 5-(1-Propynyl)ara-cytidine TP; 5-(2-Chloro-phenyl)-2-thiocytidine TP; 5-(4-Amino-phenyl)-2-thiocytidine TP; 5-Aminoallyl-CTP; 5-Cyanocytidine TP; 5-Ethynylara-cytidine TP; 5-Ethynylcytidine TP; 5′-Homo-cytidine TP; 5-Methoxycytidine TP; 5-Trifluoromethyl-Cytidine TP; N4-Amino-cytidine TP; N4-Benzoyl-cytidine TP; Pseudoisocytidine; 2′fluoro-cytidine; or 2′-OH-ara-cytidine TP.

[0222] In some embodiments, the modified nucleotides comprise: 7-methylguanosine; N2,2′-O-dimethylguanosine; N2-methylguanosine; Wyosine; 1,2′-O-dimethylguanosine; 1-methylguanosine; 2′-O-methylguanosine; 2′-O-ribosylguanosine (phosphate); 2′-O-methylguanosine; 2′-O-ribosylguanosine (phosphate); 7-aminomethyl-7-deazaguanosine; 7-cyano-7-deazaguanosine; Archaeosine; Methylwyosine; N2,7-dimethylguanosine; N2,N2,2′-O-trimethylguanosine; N2,N2,7-trimethylguanosine; N2,N2-dimethylguanosine; N2,7,2′-O-trimethylguanosine; 6-thio-guanosine; 7-deaza-guanosine; 8-oxo-guanosine; N1-methyl-guanosine; .alpha.-thio-guanosine; 2 (propyl)guanine; 2-(alkyl)guanine; 2′-Amino-2′-deoxy-GTP; 2′-Azido-2′-deoxy-GTP; 2′-Deoxy-2′-a-aminoguanosine TP; 2′-Deoxy-2′-a-azidoguanosine TP; 6 (methyl)guanine; 6-(alkyl)guanine; 6-(methyl)guanine; 6-methyl-guanosine; 7 (alkyl)guanine; 7 (deaza)guanine; 7 (methyl)guanine; 7-(alkyl)guanine; 7-(deaza)guanine; 7-(methyl)guanine; 8 (alkyl)guanine; 8 (alkynyl)guanine; 8 (halo)guanine; 8 (thioalkyl)guanine; 8-(alkenyl)guanine; 8-(alkyl)guanine; 8-(alkynyl)guanine; 8-(amino)guanine; 8-(halo)guanine; 8-(hydroxyl)guanine; 8-(thioalkyl)guanine; 8-(thiol)guanine; aza guanine; deaza guanine; N (methyl)guanine; N-(methyl)guanine; 1-methyl-6-thio-guanosine; 6-methoxy-guanosine; 6-thio-7-deaza-8-aza-guanosine; 6-thio-7-deaza-guanosine; 6-thio-7-methyl-guanosine; 7-deaza-8-aza-guanosine; 7-methyl-8-oxo-guanosine; N2,N2-dimethyl-6-thio-guanosine; N2-methyl-6-thio-guanosine; 1-Me-GTP; 2′Fluoro-N2-isobutyl-guanosine TP; 2′O-methyl-N2-isobutyl-guanosine TP; 2′-a-Ethynylguanosine TP; 2′-a-Trifluoromethylguanosine TP; 2′-b-Ethynylguanosine TP; 2′-b-Trifluoromethylguanosine TP; 2′-Deoxy-2′,2′-difluoroguanosine TP; 2′-Deoxy-2′-a-mercaptoguanosine TP; 2′-Deoxy-2′-a-thiomethoxyguanosine TP; 2′-Deoxy-2′-b-aminoguanosine TP; 2′-Deoxy-2′-b-azidoguanosine TP; 2′-Deoxy-2′-b-bromoguanosine TP; 2′-Deoxy-2′-b-chloroguanosine TP; 2′-Deoxy-2′-b-fluoroguanosine TP; 2′-Deoxy-2′-b-iodoguanosine TP; 2′-Deoxy-2′-b-mercaptoguanosine TP; 2′-Deoxy-2′-b-thiomethoxyguanosine TP; 4′-Azidoguanosine TP; 4′-Carbocyclic guanosine TP; 4′-Ethynylguanosine TP; 5′-Homo-guanosine TP; 8-bromo-guanosine TP; 9-Deazaguanosine TP; N2-isobutyl-guanosine TP; 1-methylinosine; Inosine; 1,2′-O-dimethylinosine; 2′-O-methylinosine; 7-methylinosine; 2′-O-methylinosine; Epoxyqueuosine; galactosyl-queuosine; Mannosylqueuosine; 7-(guanidiniumalkylhydroxy)-1-(aza)-2-(thio)-3-(aza)-phenoxazinl-yl; 7-(guanidiniumalkylhydroxy)-1-(aza)-2-(thio)-3-(aza)-phenthiazin-1-yl; 7-(guanidiniumalkylhydroxy)-1-(aza)-2-(thio)-3-(aza)-phenoxazin-1-yl; 7-(guanidiniumalkylhydroxy)-1,3-(diaza)-2-(oxo)-phenoxazin-1-yl; 7-(guanidiniumalkyl-hydroxy)-1,3-(diaza)-2-(oxo)-phenthiazin-1-yl; 7-(guanidiniumalkylhydroxy)-1,3-(diaza)-2-(oxo)-phenoxazin-1-yl; 7-(propynyl)isocarbostyrilyl; 7-(propynyl)isocarbostyrilyl, propynyl-7-(aza)indolyl; 7-deaza-inosinyl; 7-substituted 1-(aza)-2-(thio)-3-(aza)-phenoxazin-1-yl; 7-substituted 1,3-(diaza)-2-(oxo)-phenoxazin-1-yl; 9-(methyl)-imidizopyridinyl; Aminoindolyl; Anthracenyl; bis-ortho-(aminoalkylhydroxy)-6-phenyl-pyrrolo-pyrimidin-2-on-3-yl; bis-ortho-substituted-6-phenyl-pyrrolo-pyrimidin-2-on-3-yl; Difluorotolyl; Hypoxanthine; Imidizopyridinyl; Inosinyl; Isocarbostyrilyl; Isoguanisine; N2-substituted purines; N6-methyl-2-amino-purine; N6-substituted purines; N-alkylated derivative; Napthalenyl; Nitrobenzimidazolyl; Nitroimidazolyl; Nitroindazolyl; Nitropyrazolyl; Nubularine; 06-substituted purines; O-alkylated derivative; ortho-(aminoalkylhydroxy)-6-phenyl-pyrrolo-pyrimidin-2-on-3-yl; ortho-substituted-6-phenyl-pyrrolo-pyrimidin-2-on-3-yl; Oxoformycin TP; para-(aminoalkylhydroxy)-6-phenyl-pyrrolo-pyrimidin-2-on-3-yl; para-substituted-6-phenyl-pyrrolo-pyrimidin-2-on-3-yl; Pentacenyl; Phenanthracenyl; Phenyl; propynyl-7-(aza)indolyl; Pyrenyl; pyridopyrimidin-3-yl; pyridopyrimidin-3-yl, 2-oxo-7-amino-pyridopyrimidin-3-yl; pyrrolo-pyrimidin-2-on-3-yl; Pyrrolopyrimidinyl; Pyrrolopyrizinyl; Stilbenzyl; substituted 1,2,4-triazoles; Tetracenyl; Tubercidine; Xanthine; Xanthosine-5′-TP; 2-thio-zebularine; 5-aza-2-thio-zebularine; 7-deaza-2-amino-purine; pyridin-4-one ribonucleoside; 2-Amino-riboside-TP; Formycin A TP; Formycin B TP; Pyrrolosine TP; or 2′-OH-ara-guanosine TP.

### Lipid Carriers

[0223] As noted above, LNPs are listed as adjuvants, but in this regard, they also provide another function that is, in some embodiments, co-extensive with, and in some embodiments, independent of adjuvanticity. That is, RNA, by itself and unprotected, may be degraded by the subject's RNAases. LNPs provide a means to protect the RNA by encapsulating or comprising within them an amount of the RNA of the overall composition or formulation. The LNP's effects as being in some cases an adjuvant, in other cases a delivery vehicle, and in other cases both, can be cell-dependent. To illustrate but without being bound by a particular theory, the LNP may provide adjuvanticity to peripheral blood mononuclear cells in that the RNA activates the cells but may not be expressed therein, but the LNP may provide a delivery vehicle, but not adjuvanticity, to other somatic cell types, for arguendo example, skeletal muscle cells.

[0224] In some embodiments, the pharmaceutically acceptable delivery vehicle comprises a lipid nanoparticle (LNP). In some embodiments, the LNPs encapsulate, comprise within them, consist within them, consist essentially within them, or have within them at least: 85.0%, 85.1%, 85.2%, 85.3%, 85.4%, 85.5%, 85.6%, 85.7%, 85.8%, 85.9%, 86.0%, 86.1%, 86.2%, 86.3%, 86.4%, 86.5%, 86.6%, 86.7%, 86.8%, 86.9%, 87.0%, 87.1%, 87.2%, 87.3%, 87.4%, 87.5%, 87.6%, 87.7%, 87.8%, 87.9%, 88.0%, 88.1%, 88.2%, 88.3%, 88.4%, 88.5%, 88.6%, 88.7%, 88.8%, 88.9%, 89.0%, 89.1%, 89.2%, 89.3%, 89.4%, 89.5%, 89.6%, 89.7%, 89.8%, 89.9%, 90.0%, 90.1%, 90.2%, 90.3%, 90.4%, 90.5%, 90.6%, 90.7%, 90.8%, 90.9%, 91.0%, 91.1%, 91.2%, 91.3%, 91.4%, 91.5%, 91.6%, 91.7%, 91.8%, 91.9%, 92.0%, 92.1%, 92.2%, 92.3%, 92.4%, 92.5%, 92.6%, 92.7%, 92.8%, 92.9%, 93.0%, 93.1%, 93.2%, 93.3%, 93.4%, 93.5%, 93.6%, 93.7%, 93.8%, 93.9%, 94.0%, 94.1%, 94.2%, 94.3%, 94.4%, 94.5%, 94.6%, 94.7%, 94.8%, 94.9%, 95.0%, 95.1%, 95.2%, 95.3%, 95.4%, 95.5%, 95.6%, 95.7%, 95.8%, 95.9%, 96.0%, 96.1%, 96.2%, 96.3%, 96.4%, 96.5%, 96.6%, 96.7%, 96.8%, 96.9%, 97.0%, 97.1%, 97.2%, 97.3%, 97.4%, 97.5%, 97.6%, 97.7%, 97.8%, 97.9%, 98.0%, 98.1%, 98.2%, 98.3%, 98.4%, 98.5%, 98.6%, 98.7%, 98.8%, 98.9%, 99.0%, 99.1%, 99.2%, 99.3%, 99.4%, 99.5%, 99.6%, 99.7%, 99.8%, 99.9%, or 100% of the RNA. In some embodiments, the LNPs encapsulate, comprise within them, consist within them, consist essentially within them, or have within them no more than: 85.0%, 85.1%, 85.2%, 85.3%, 85.4%, 85.5%, 85.6%, 85.7%, 85.8%, 85.9%, 86.0%, 86.1%, 86.2%, 86.3%, 86.4%, 86.5%, 86.6%, 86.7%, 86.8%, 86.9%, 87.0%, 87.1%, 87.2%, 87.3%, 87.4%, 87.5%, 87.6%, 87.7%, 87.8%, 87.9%, 88.0%, 88.1%, 88.2%, 88.3%, 88.4%, 88.5%, 88.6%, 88.7%, 88.8%, 88.9%, 89.0%, 89.1%, 89.2%, 89.3%, 89.4%, 89.5%, 89.6%, 89.7%, 89.8%, 89.9%, 90.0%, 90.1%, 90.2%, 90.3%, 90.4%, 90.5%, 90.6%, 90.7%, 90.8%, 90.9%, 91.0%, 91.1%, 91.2%, 91.3%, 91.4%, 91.5%, 91.6%, 91.7%, 91.8%, 91.9%, 92.0%, 92.1%, 92.2%, 92.3%, 92.4%, 92.5%, 92.6%, 92.7%, 92.8%, 92.9%, 93.0%, 93.1%, 93.2%, 93.3%, 93.4%, 93.5%, 93.6%, 93.7%, 93.8%, 93.9%, 94.0%, 94.1%, 94.2%, 94.3%, 94.4%, 94.5%, 94.6%, 94.7%, 94.8%, 94.9%, 95.0%, 95.1%, 95.2%, 95.3%, 95.4%, 95.5%, 95.6%, 95.7%, 95.8%, 95.9%, 96.0%, 96.1%, 96.2%, 96.3%, 96.4%, 96.5%, 96.6%, 96.7%, 96.8%, 96.9%, 97.0%, 97.1%, 97.2%, 97.3%, 97.4%, 97.5%, 97.6%, 97.7%, 97.8%, 97.9%, 98.0%, 98.1%, 98.2%, 98.3%, 98.4%, 98.5%, 98.6%, 98.7%, 98.8%, 98.9%, 99.0%, 99.1%, 99.2%, 99.3%, 99.4%, 99.5%, 99.6%, 99.7%, 99.8%, 99.9%, or 100% of the RNA. In some embodiments, the LNPs encapsulate, comprise within them, consist within them, consist essentially within them, or have within them from 85% to: 86.0%, 86.1%, 86.2%, 86.3%, 86.4%, 86.5%, 86.6%, 86.7%, 86.8%, 86.9%, 87.0%, 87.1%, 87.2%, 87.3%, 87.4%, 87.5%, 87.6%, 87.7%, 87.8%, 87.9%, 88.0%, 88.1%, 88.2%, 88.3%, 88.4%, 88.5%, 88.6%, 88.7%, 88.8%, 88.9%, 89.0%, 89.1%, 89.2%, 89.3%, 89.4%, 89.5%, 89.6%, 89.7%, 89.8%, 89.9%, 90.0%, 90.1%, 90.2%, 90.3%, 90.4%, 90.5%, 90.6%, 90.7%, 90.8%, 90.9%, 91.0%, 91.1%, 91.2%, 91.3%, 91.4%, 91.5%, 91.6%, 91.7%, 91.8%, 91.9%, 92.0%, 92.1%, 92.2%, 92.3%, 92.4%, 92.5%, 92.6%, 92.7%, 92.8%, 92.9%, 93.0%, 93.1%, 93.2%, 93.3%, 93.4%, 93.5%, 93.6%, 93.7%, 93.8%, 93.9%, 94.0%, 94.1%, 94.2%, 94.3%, 94.4%, 94.5%, 94.6%, 94.7%, 94.8%, 94.9%, 95.0%, 95.1%, 95.2%, 95.3%, 95.4%, 95.5%, 95.6%, 95.7%, 95.8%, 95.9%, 96.0%, 96.1%, 96.2%, 96.3%, 96.4%, 96.5%, 96.6%, 96.7%, 96.8%, 96.9%, 97.0%, 97.1%, 97.2%, 97.3%, 97.4%, 97.5%, 97.6%, 97.7%, 97.8%, 97.9%, 98.0%, 98.1%, 98.2%, 98.3%, 98.4%, 98.5%, 98.6%, 98.7%, 98.8%, 98.9%, 99.0%, 99.1%, 99.2%, 99.3%, 99.4%, 99.5%, 99.6%, 99.7%, 99.8%, 99.9%, or 100%; from 86% to: 87.0%, 87.1%, 87.2%, 87.3%, 87.4%, 87.5%, 87.6%, 87.7%, 87.8%, 87.9%, 88.0%, 88.1%, 88.2%, 88.3%, 88.4%, 88.5%, 88.6%, 88.7%, 88.8%, 88.9%, 89.0%, 89.1%, 89.2%, 89.3%, 89.4%, 89.5%, 89.6%, 89.7%, 89.8%, 89.9%, 90.0%, 90.1%, 90.2%, 90.3%, 90.4%, 90.5%, 90.6%, 90.7%, 90.8%, 90.9%, 91.0%, 91.1%, 91.2%, 91.3%, 91.4%, 91.5%, 91.6%, 91.7%, 91.8%, 91.9%, 92.0%, 92.1%, 92.2%, 92.3%, 92.4%, 92.5%, 92.6%, 92.7%, 92.8%, 92.9%, 93.0%, 93.1%, 93.2%, 93.3%, 93.4%, 93.5%, 93.6%, 93.7%, 93.8%, 93.9%, 94.0%, 94.1%, 94.2%, 94.3%, 94.4%, 94.5%, 94.6%, 94.7%, 94.8%, 94.9%, 95.0%, 95.1%, 95.2%, 95.3%, 95.4%, 95.5%, 95.6%, 95.7%, 95.8%, 95.9%, 96.0%, 96.1%, 96.2%, 96.3%, 96.4%, 96.5%, 96.6%, 96.7%, 96.8%, 96.9%, 97.0%, 97.1%, 97.2%, 97.3%, 97.4%, 97.5%, 97.6%, 97.7%, 97.8%, 97.9%, 98.0%, 98.1%, 98.2%, 98.3%, 98.4%, 98.5%, 98.6%, 98.7%, 98.8%, 98.9%, 99.0%, 99.1%, 99.2%, 99.3%, 99.4%, 99.5%, 99.6%, 99.7%, 99.8%, 99.9%, or 100%; from 87% to 88.0%, 88.1%, 88.2%, 88.3%, 88.4%, 88.5%, 88.6%, 88.7%, 88.8%, 88.9%, 89.0%, 89.1%, 89.2%, 89.3%, 89.4%, 89.5%, 89.6%, 89.7%, 89.8%, 89.9%, 90.0%, 90.1%, 90.2%, 90.3%, 90.4%, 90.5%, 90.6%, 90.7%, 90.8%, 90.9%, 91.0%, 91.1%, 91.2%, 91.3%, 91.4%, 91.5%, 91.6%, 91.7%, 91.8%, 91.9%, 92.0%, 92.1%, 92.2%, 92.3%, 92.4%, 92.5%, 92.6%, 92.7%, 92.8%, 92.9%, 93.0%, 93.1%, 93.2%, 93.3%, 93.4%, 93.5%, 93.6%, 93.7%, 93.8%, 93.9%, 94.0%, 94.1%, 94.2%, 94.3%, 94.4%, 94.5%, 94.6%, 94.7%, 94.8%, 94.9%, 95.0%, 95.1%, 95.2%, 95.3%, 95.4%, 95.5%, 95.6%, 95.7%, 95.8%, 95.9%, 96.0%, 96.1%, 96.2%, 96.3%, 96.4%, 96.5%, 96.6%, 96.7%, 96.8%, 96.9%, 97.0%, 97.1%, 97.2%, 97.3%, 97.4%, 97.5%, 97.6%, 97.7%, 97.8%, 97.9%, 98.0%, 98.1%, 98.2%, 98.3%, 98.4%, 98.5%, 98.6%, 98.7%, 98.8%, 98.9%, 99.0%, 99.1%, 99.2%, 99.3%, 99.4%, 99.5%, 99.6%, 99.7%, 99.8%, 99.9%, or 100%; from 88% to: 89.0%, 89.1%, 89.2%, 89.3%, 89.4%, 89.5%, 89.6%, 89.7%, 89.8%, 89.9%, 90.0%, 90.1%, 90.2%, 90.3%, 90.4%, 90.5%, 90.6%, 90.7%, 90.8%, 90.9%, 91.0%, 91.1%, 91.2%, 91.3%, 91.4%, 91.5%, 91.6%, 91.7%, 91.8%, 91.9%, 92.0%, 92.1%, 92.2%, 92.3%, 92.4%, 92.5%, 92.6%, 92.7%, 92.8%, 92.9%, 93.0%, 93.1%, 93.2%, 93.3%, 93.4%, 93.5%, 93.6%, 93.7%, 93.8%, 93.9%, 94.0%, 94.1%, 94.2%, 94.3%, 94.4%, 94.5%, 94.6%, 94.7%, 94.8%, 94.9%, 95.0%, 95.1%, 95.2%, 95.3%, 95.4%, 95.5%, 95.6%, 95.7%, 95.8%, 95.9%, 96.0%, 96.1%, 96.2%, 96.3%, 96.4%, 96.5%, 96.6%, 96.7%, 96.8%, 96.9%, 97.0%, 97.1%, 97.2%, 97.3%, 97.4%, 97.5%, 97.6%, 97.7%, 97.8%, 97.9%, 98.0%, 98.1%, 98.2%, 98.3%, 98.4%, 98.5%, 98.6%, 98.7%, 98.8%, 98.9%, 99.0%, 99.1%, 99.2%, 99.3%, 99.4%, 99.5%, 99.6%, 99.7%, 99.8%, 99.9%, or 100%; from 89% to: 90.0%, 90.1%, 90.2%, 90.3%, 90.4%, 90.5%, 90.6%, 90.7%, 90.8%, 90.9%, 91.0%, 91.1%, 91.2%, 91.3%, 91.4%, 91.5%, 91.6%, 91.7%, 91.8%, 91.9%, 92.0%, 92.1%, 92.2%, 92.3%, 92.4%, 92.5%, 92.6%, 92.7%, 92.8%, 92.9%, 93.0%, 93.1%, 93.2%, 93.3%, 93.4%, 93.5%, 93.6%, 93.7%, 93.8%, 93.9%, 94.0%, 94.1%, 94.2%, 94.3%, 94.4%, 94.5%, 94.6%, 94.7%, 94.8%, 94.9%, 95.0%, 95.1%, 95.2%, 95.3%, 95.4%, 95.5%, 95.6%, 95.7%, 95.8%, 95.9%, 96.0%, 96.1%, 96.2%, 96.3%, 96.4%, 96.5%, 96.6%, 96.7%, 96.8%, 96.9%, 97.0%, 97.1%, 97.2%, 97.3%, 97.4%, 97.5%, 97.6%, 97.7%, 97.8%, 97.9%, 98.0%, 98.1%, 98.2%, 98.3%, 98.4%, 98.5%, 98.6%, 98.7%, 98.8%, 98.9%, 99.0%, 99.1%, 99.2%, 99.3%, 99.4%, 99.5%, 99.6%, 99.7%, 99.8%, 99.9%, or 100%; from 90% to: 91.0%, 91.1%, 91.2%, 91.3%, 91.4%, 91.5%, 91.6%, 91.7%, 91.8%, 91.9%, 92.0%, 92.1%, 92.2%, 92.3%, 92.4%, 92.5%, 92.6%, 92.7%, 92.8%, 92.9%, 93.0%, 93.1%, 93.2%, 93.3%, 93.4%, 93.5%, 93.6%, 93.7%, 93.8%, 93.9%, 94.0%, 94.1%, 94.2%, 94.3%, 94.4%, 94.5%, 94.6%, 94.7%, 94.8%, 94.9%, 95.0%, 95.1%, 95.2%, 95.3%, 95.4%, 95.5%, 95.6%, 95.7%, 95.8%, 95.9%, 96.0%, 96.1%, 96.2%, 96.3%, 96.4%, 96.5%, 96.6%, 96.7%, 96.8%, 96.9%, 97.0%, 97.1%, 97.2%, 97.3%, 97.4%, 97.5%, 97.6%, 97.7%, 97.8%, 97.9%, 98.0%, 98.1%, 98.2%, 98.3%, 98.4%, 98.5%, 98.6%, 98.7%, 98.8%, 98.9%, 99.0%, 99.1%, 99.2%, 99.3%, 99.4%, 99.5%, 99.6%, 99.7%, 99.8%, 99.9%, or 100%; from 91% to: 92.0%, 92.1%, 92.2%, 92.3%, 92.4%, 92.5%, 92.6%, 92.7%, 92.8%, 92.9%, 93.0%, 93.1%, 93.2%, 93.3%, 93.4%, 93.5%, 93.6%, 93.7%, 93.8%, 93.9%, 94.0%, 94.1%, 94.2%, 94.3%, 94.4%, 94.5%, 94.6%, 94.7%, 94.8%, 94.9%, 95.0%, 95.1%, 95.2%, 95.3%, 95.4%, 95.5%, 95.6%, 95.7%, 95.8%, 95.9%, 96.0%, 96.1%, 96.2%, 96.3%, 96.4%, 96.5%, 96.6%, 96.7%, 96.8%, 96.9%, 97.0%, 97.1%, 97.2%, 97.3%, 97.4%, 97.5%, 97.6%, 97.7%, 97.8%, 97.9%, 98.0%, 98.1%, 98.2%, 98.3%, 98.4%, 98.5%, 98.6%, 98.7%, 98.8%, 98.9%, 99.0%, 99.1%, 99.2%, 99.3%, 99.4%, 99.5%, 99.6%, 99.7%, 99.8%, 99.9%, or 100%; from 92% to: 93.0%, 93.1%, 93.2%, 93.3%, 93.4%, 93.5%, 93.6%, 93.7%, 93.8%, 93.9%, 94.0%, 94.1%, 94.2%, 94.3%, 94.4%, 94.5%, 94.6%, 94.7%, 94.8%, 94.9%, 95.0%, 95.1%, 95.2%, 95.3%, 95.4%, 95.5%, 95.6%, 95.7%, 95.8%, 95.9%, 96.0%, 96.1%, 96.2%, 96.3%, 96.4%, 96.5%, 96.6%, 96.7%, 96.8%, 96.9%, 97.0%, 97.1%, 97.2%, 97.3%, 97.4%, 97.5%, 97.6%, 97.7%, 97.8%, 97.9%, 98.0%, 98.1%, 98.2%, 98.3%, 98.4%, 98.5%, 98.6%, 98.7%, 98.8%, 98.9%, 99.0%, 99.1%, 99.2%, 99.3%, 99.4%, 99.5%, 99.6%, 99.7%, 99.8%, 99.9%, or 100%; from 93% to: 94.0%, 94.1%, 94.2%, 94.3%, 94.4%, 94.5%, 94.6%, 94.7%, 94.8%, 94.9%, 95.0%, 95.1%, 95.2%, 95.3%, 95.4%, 95.5%, 95.6%, 95.7%, 95.8%, 95.9%, 96.0%, 96.1%, 96.2%, 96.3%, 96.4%, 96.5%, 96.6%, 96.7%, 96.8%, 96.9%, 97.0%, 97.1%, 97.2%, 97.3%, 97.4%, 97.5%, 97.6%, 97.7%, 97.8%, 97.9%, 98.0%, 98.1%, 98.2%, 98.3%, 98.4%, 98.5%, 98.6%, 98.7%, 98.8%, 98.9%, 99.0%, 99.1%, 99.2%, 99.3%, 99.4%, 99.5%, 99.6%, 99.7%, 99.8%, 99.9%, or 100%; from 94% to: 95.0%, 95.1%, 95.2%, 95.3%, 95.4%, 95.5%, 95.6%, 95.7%, 95.8%, 95.9%, 96.0%, 96.1%, 96.2%, 96.3%, 96.4%, 96.5%, 96.6%, 96.7%, 96.8%, 96.9%, 97.0%, 97.1%, 97.2%, 97.3%, 97.4%, 97.5%, 97.6%, 97.7%, 97.8%, 97.9%, 98.0%, 98.1%, 98.2%, 98.3%, 98.4%, 98.5%, 98.6%, 98.7%, 98.8%, 98.9%, 99.0%, 99.1%, 99.2%, 99.3%, 99.4%, 99.5%, 99.6%, 99.7%, 99.8%, 99.9%, or 100%; from 95% to: 96.0%, 96.1%, 96.2%, 96.3%, 96.4%, 96.5%, 96.6%, 96.7%, 96.8%, 96.9%, 97.0%, 97.1%, 97.2%, 97.3%, 97.4%, 97.5%, 97.6%, 97.7%, 97.8%, 97.9%, 98.0%, 98.1%, 98.2%, 98.3%, 98.4%, 98.5%, 98.6%, 98.7%, 98.8%, 98.9%, 99.0%, 99.1%, 99.2%, 99.3%, 99.4%, 99.5%, 99.6%, 99.7%, 99.8%, 99.9%, or 100%; from 96% to: 97.0%, 97.1%, 97.2%, 97.3%, 97.4%, 97.5%, 97.6%, 97.7%, 97.8%, 97.9%, 98.0%, 98.1%, 98.2%, 98.3%, 98.4%, 98.5%, 98.6%, 98.7%, 98.8%, 98.9%, 99.0%, 99.1%, 99.2%, 99.3%, 99.4%, 99.5%, 99.6%, 99.7%, 99.8%, 99.9%, or 100%; from 97.0% to: 98.0%, 98.1%, 98.2%, 98.3%, 98.4%, 98.5%, 98.6%, 98.7%, 98.8%, 98.9%, 99.0%, 99.1%, 99.2%, 99.3%, 99.4%, 99.5%, 99.6%, 99.7%, 99.8%, 99.9%, or 100%; from 97.5% to: 98.0%, 98.1%, 98.2%, 98.3%, 98.4%, 98.5%, 98.6%, 98.7%, 98.8%, 98.9%, 99.0%, 99.1%, 99.2%, 99.3%, 99.4%, 99.5%, 99.6%, 99.7%, 99.8%, 99.9%, or 100%; from 98.0% to: 98.3%, 98.4%, 98.5%, 98.6%, 98.7%, 98.8%, 98.9%, 99.0%, 99.1%, 99.2%, 99.3%, 99.4%, 99.5%, 99.6%, 99.7%, 99.8%, 99.9%, or 100%; from 98.5% to: 98.6%, 98.7%, 98.8%, 98.9%, 99.0%, 99.1%, 99.2%, 99.3%, 99.4%, 99.5%, 99.6%, 99.7%, 99.8%, 99.9%, or 100%; or from: 99.0% to: 99.1%, 99.2%, 99.3%, 99.4%, 99.5%, 99.6%, 99.7%, 99.8%, 99.9%, or 100% of the RNA. In this regard, the foregoing percentages reference the number of RNA molecules encapsulated or comprised within the LNPs compared to the total number of RNA molecules in the composition and not the percentage of the length of any one RNA molecule being within and outside of the LNP. Also contemplated and supported are combinations of the above-noted percentages of “at least” and “no more than” with the percentages of encapsulation provided in the Examples section of this document. Also contemplated and supported are combinations of the percentages of encapsulation of this document to provide a range (i.e. the LNPs encapsulate, comprise within them, consist within them, consist essentially within them, or have within them from [the percent encapsulation of LNP formulation X₁ in the Examples] to [the percent encapsulation of LNP formulation X₂ in the Examples] wherein X₁ and X₂ represent any two exemplary LNP formulations of the Examples).

[0225] In some embodiments, 80% of the LNPs have a diameter of at least: 20 nm, 21 nm, 22 nm, 23 nm, 24 nm, 25 nm, 26 nm, 27 nm, 28 nm, 29 nm, 30 nm, 31 nm, 32 nm, 33 nm, 34 nm, 35 nm, 36 nm, 37 nm, 38 nm, 39 nm, 40 nm, 41 nm, 42 nm, 43 nm, 44 nm, 45 nm, 46 nm, 47 nm, 48 nm, 49 nm, 50 nm, 51 nm, 52 nm, 53 nm, 54 nm, 55 nm, 56 nm, 57 nm, 58 nm, 59 nm, 60 nm, 61 nm, 62 nm, 63 nm, 64 nm, 65 nm, 66 nm, 67 nm, 68 nm, 69 nm, 70 nm, 71 nm, 72 nm, 73 nm, 74 nm, 75 nm, 76 nm, 77 nm, 78 nm, 79 nm, 80 nm, 81 nm, 82 nm, 83 nm, 84 nm, 85 nm, 86 nm, 87 nm, 88 nm, 89 nm, 90 nm, 91 nm, 92 nm, 93 nm, 94 nm, 95 nm, 96 nm, 97 nm, 98 nm, 99 nm, 100 nm, 101 nm, 102 nm, 103 nm, 104 nm, 105 nm, 106 nm, 107 nm, 108 nm, 109 nm, 110 nm, 111 nm, 112 nm, 113 nm, 114 nm, 115 nm, 116 nm, 117 nm, 118 nm, 119 nm, 120 nm, 121 nm, 122 nm, 123 nm, 124 nm, 125 nm, 126 nm, 127 nm, 128 nm, 129 nm, 130 nm, 131 nm, 132 nm, 133 nm, 134 nm, 135 nm, 136 nm, 137 nm, 138 nm, 139 nm, 140 nm, 141 nm, 142 nm, 143 nm, 144 nm, 145 nm, 146 nm, 147 nm, 148 nm, 149 nm, 150 nm, 151 nm, 152 nm, 153 nm, 154 nm, 155 nm, 156 nm, 157 nm, 158 nm, 159 nm, 160 nm, 161 nm, 162 nm, 163 nm, 164 nm, 165 nm, 166 nm, 167 nm, 168 nm, 169 nm, 170 nm, 171 nm, 172 nm, 173 nm, 174 nm, 175 nm, 176 nm, 177 nm, 178 nm, 179 nm, 180 nm, 181 nm, 182 nm, 183 nm, 184 nm, 185 nm, 186 nm, 187 nm, 188 nm, 189 nm, 190 nm, 191 nm, 192 nm, 193 nm, 194 nm, 195 nm, 196 nm, 197 nm, 198 nm, 199 nm, 200 nm, 201 nm, 202 nm, 203 nm, 204 nm, 205 nm, 206 nm, 207 nm, 208 nm, 209 nm, 210 nm, 211 nm, 212 nm, 213 nm, 214 nm, 215 nm, 216 nm, 217 nm, 218 nm, 219 nm, or 220 nm. In some embodiments, 80% of the LNPs have a diameter of no more than: 20 nm, 21 nm, 22 nm, 23 nm, 24 nm, 25 nm, 26 nm, 27 nm, 28 nm, 29 nm, 30 nm, 31 nm, 32 nm, 33 nm, 34 nm, 35 nm, 36 nm, 37 nm, 38 nm, 39 nm, 40 nm, 41 nm, 42 nm, 43 nm, 44 nm, 45 nm, 46 nm, 47 nm, 48 nm, 49 nm, 50 nm, 51 nm, 52 nm, 53 nm, 54 nm, 55 nm, 56 nm, 57 nm, 58 nm, 59 nm, 60 nm, 61 nm, 62 nm, 63 nm, 64 nm, 65 nm, 66 nm, 67 nm, 68 nm, 69 nm, 70 nm, 71 nm, 72 nm, 73 nm, 74 nm, 75 nm, 76 nm, 77 nm, 78 nm, 79 nm, 80 nm, 81 nm, 82 nm, 83 nm, 84 nm, 85 nm, 86 nm, 87 nm, 88 nm, 89 nm, 90 nm, 91 nm, 92 nm, 93 nm, 94 nm, 95 nm, 96 nm, 97 nm, 98 nm, 99 nm, 100 nm, 101 nm, 102 nm, 103 nm, 104 nm, 105 nm, 106 nm, 107 nm, 108 nm, 109 nm, 110 nm, 111 nm, 112 nm, 113 nm, 114 nm, 115 nm, 116 nm, 117 nm, 118 nm, 119 nm, 120 nm, 121 nm, 122 nm, 123 nm, 124 nm, 125 nm, 126 nm, 127 nm, 128 nm, 129 nm, 130 nm, 131 nm, 132 nm, 133 nm, 134 nm, 135 nm, 136 nm, 137 nm, 138 nm, 139 nm, 140 nm, 141 nm, 142 nm, 143 nm, 144 nm, 145 nm, 146 nm, 147 nm, 148 nm, 149 nm, 150 nm, 151 nm, 152 nm, 153 nm, 154 nm, 155 nm, 156 nm, 157 nm, 158 nm, 159 nm, 160 nm, 161 nm, 162 nm, 163 nm, 164 nm, 165 nm, 166 nm, 167 nm, 168 nm, 169 nm, 170 nm, 171 nm, 172 nm, 173 nm, 174 nm, 175 nm, 176 nm, 177 nm, 178 nm, 179 nm, 180 nm, 181 nm, 182 nm, 183 nm, 184 nm, 185 nm, 186 nm, 187 nm, 188 nm, 189 nm, 190 nm, 191 nm, 192 nm, 193 nm, 194 nm, 195 nm, 196 nm, 197 nm, 198 nm, 199 nm, 200 nm, 201 nm, 202 nm, 203 nm, 204 nm, 205 nm, 206 nm, 207 nm, 208 nm, 209 nm, 210 nm, 211 nm, 212 nm, 213 nm, 214 nm, 215 nm, 216 nm, 217 nm, 218 nm, 219 nm, or 220 nm.

[0226] In some embodiments, the LNPs have a diameter of at least: 20 nm, 21 nm, 22 nm, 23 nm, 24 nm, 25 nm, 26 nm, 27 nm, 28 nm, 29 nm, 30 nm, 31 nm, 32 nm, 33 nm, 34 nm, 35 nm, 36 nm, 37 nm, 38 nm, 39 nm, 40 nm, 41 nm, 42 nm, 43 nm, 44 nm, 45 nm, 46 nm, 47 nm, 48 nm, 49 nm, 50 nm, 51 nm, 52 nm, 53 nm, 54 nm, 55 nm, 56 nm, 57 nm, 58 nm, 59 nm, 60 nm, 61 nm, 62 nm, 63 nm, 64 nm, 65 nm, 66 nm, 67 nm, 68 nm, 69 nm, 70 nm, 71 nm, 72 nm, 73 nm, 74 nm, 75 nm, 76 nm, 77 nm, 78 nm, 79 nm, 80 nm, 81 nm, 82 nm, 83 nm, 84 nm, 85 nm, 86 nm, 87 nm, 88 nm, 89 nm, 90 nm, 91 nm, 92 nm, 93 nm, 94 nm, 95 nm, 96 nm, 97 nm, 98 nm, 99 nm, 100 nm, 101 nm, 102 nm, 103 nm, 104 nm, 105 nm, 106 nm, 107 nm, 108 nm, 109 nm, 110 nm, 111 nm, 112 nm, 113 nm, 114 nm, 115 nm, 116 nm, 117 nm, 118 nm, 119 nm, 120 nm, 121 nm, 122 nm, 123 nm, 124 nm, 125 nm, 126 nm, 127 nm, 128 nm, 129 nm, 130 nm, 131 nm, 132 nm, 133 nm, 134 nm, 135 nm, 136 nm, 137 nm, 138 nm, 139 nm, 140 nm, 141 nm, 142 nm, 143 nm, 144 nm, 145 nm, 146 nm, 147 nm, 148 nm, 149 nm, 150 nm, 151 nm, 152 nm, 153 nm, 154 nm, 155 nm, 156 nm, 157 nm, 158 nm, 159 nm, 160 nm, 161 nm, 162 nm, 163 nm, 164 nm, 165 nm, 166 nm, 167 nm, 168 nm, 169 nm, 170 nm, 171 nm, 172 nm, 173 nm, 174 nm, 175 nm, 176 nm, 177 nm, 178 nm, 179 nm, 180 nm, 181 nm, 182 nm, 183 nm, 184 nm, 185 nm, 186 nm, 187 nm, 188 nm, 189 nm, 190 nm, 191 nm, 192 nm, 193 nm, 194 nm, 195 nm, 196 nm, 197 nm, 198 nm, 199 nm, 200 nm, 201 nm, 202 nm, 203 nm, 204 nm, 205 nm, 206 nm, 207 nm, 208 nm, 209 nm, 210 nm, 211 nm, 212 nm, 213 nm, 214 nm, 215 nm, 216 nm, 217 nm, 218 nm, 219 nm, or 220 nm. In some embodiments, LNPs have a diameter of no more than: 20 nm, 21 nm, 22 nm, 23 nm, 24 nm, 25 nm, 26 nm, 27 nm, 28 nm, 29 nm, 30 nm, 31 nm, 32 nm, 33 nm, 34 nm, 35 nm, 36 nm, 37 nm, 38 nm, 39 nm, 40 nm, 41 nm, 42 nm, 43 nm, 44 nm, 45 nm, 46 nm, 47 nm, 48 nm, 49 nm, 50 nm, 51 nm, 52 nm, 53 nm, 54 nm, 55 nm, 56 nm, 57 nm, 58 nm, 59 nm, 60 nm, 61 nm, 62 nm, 63 nm, 64 nm, 65 nm, 66 nm, 67 nm, 68 nm, 69 nm, 70 nm, 71 nm, 72 nm, 73 nm, 74 nm, 75 nm, 76 nm, 77 nm, 78 nm, 79 nm, 80 nm, 81 nm, 82 nm, 83 nm, 84 nm, 85 nm, 86 nm, 87 nm, 88 nm, 89 nm, 90 nm, 91 nm, 92 nm, 93 nm, 94 nm, 95 nm, 96 nm, 97 nm, 98 nm, 99 nm, 100 nm, 101 nm, 102 nm, 103 nm, 104 nm, 105 nm, 106 nm, 107 nm, 108 nm, 109 nm, 110 nm, 111 nm, 112 nm, 113 nm, 114 nm, 115 nm, 116 nm, 117 nm, 118 nm, 119 nm, 120 nm, 121 nm, 122 nm, 123 nm, 124 nm, 125 nm, 126 nm, 127 nm, 128 nm, 129 nm, 130 nm, 131 nm, 132 nm, 133 nm, 134 nm, 135 nm, 136 nm, 137 nm, 138 nm, 139 nm, 140 nm, 141 nm, 142 nm, 143 nm, 144 nm, 145 nm, 146 nm, 147 nm, 148 nm, 149 nm, 150 nm, 151 nm, 152 nm, 153 nm, 154 nm, 155 nm, 156 nm, 157 nm, 158 nm, 159 nm, 160 nm, 161 nm, 162 nm, 163 nm, 164 nm, 165 nm, 166 nm, 167 nm, 168 nm, 169 nm, 170 nm, 171 nm, 172 nm, 173 nm, 174 nm, 175 nm, 176 nm, 177 nm, 178 nm, 179 nm, 180 nm, 181 nm, 182 nm, 183 nm, 184 nm, 185 nm, 186 nm, 187 nm, 188 nm, 189 nm, 190 nm, 191 nm, 192 nm, 193 nm, 194 nm, 195 nm, 196 nm, 197 nm, 198 nm, 199 nm, 200 nm, 201 nm, 202 nm, 203 nm, 204 nm, 205 nm, 206 nm, 207 nm, 208 nm, 209 nm, 210 nm, 211 nm, 212 nm, 213 nm, 214 nm, 215 nm, 216 nm, 217 nm, 218 nm, 219 nm, or 220 nm.

[0227] In some embodiments, 80% of the LNPs have a diameter from 20 nm to: 21 nm, 22 nm, 23 nm, 24 nm, 25 nm, 26 nm, 27 nm, 28 nm, 29 nm, 30 nm, 31 nm, 32 nm, 33 nm, 34 nm, 35 nm, 36 nm, 37 nm, 38 nm, 39 nm, 40 nm, 41 nm, 42 nm, 43 nm, 44 nm, 45 nm, 46 nm, 47 nm, 48 nm, 49 nm, 50 nm, 51 nm, 52 nm, 53 nm, 54 nm, 55 nm, 56 nm, 57 nm, 58 nm, 59 nm, 60 nm, 61 nm, 62 nm, 63 nm, 64 nm, 65 nm, 66 nm, 67 nm, 68 nm, 69 nm, 70 nm, 71 nm, 72 nm, 73 nm, 74 nm, 75 nm, 76 nm, 77 nm, 78 nm, 79 nm, 80 nm, 81 nm, 82 nm, 83 nm, 84 nm, 85 nm, 86 nm, 87 nm, 88 nm, 89 nm, 90 nm, 91 nm, 92 nm, 93 nm, 94 nm, 95 nm, 96 nm, 97 nm, 98 nm, 99 nm, 100 nm, 101 nm, 102 nm, 103 nm, 104 nm, 105 nm, 106 nm, 107 nm, 108 nm, 109 nm, 110 nm, 111 nm, 112 nm, 113 nm, 114 nm, 115 nm, 116 nm, 117 nm, 118 nm, 119 nm, 120 nm, 121 nm, 122 nm, 123 nm, 124 nm, 125 nm, 126 nm, 127 nm, 128 nm, 129 nm, 130 nm, 131 nm, 132 nm, 133 nm, 134 nm, 135 nm, 136 nm, 137 nm, 138 nm, 139 nm, 140 nm, 141 nm, 142 nm, 143 nm, 144 nm, 145 nm, 146 nm, 147 nm, 148 nm, 149 nm, 150 nm, 151 nm, 152 nm, 153 nm, 154 nm, 155 nm, 156 nm, 157 nm, 158 nm, 159 nm, 160 nm, 161 nm, 162 nm, 163 nm, 164 nm, 165 nm, 166 nm, 167 nm, 168 nm, 169 nm, 170 nm, 171 nm, 172 nm, 173 nm, 174 nm, 175 nm, 176 nm, 177 nm, 178 nm, 179 nm, 180 nm, 181 nm, 182 nm, 183 nm, 184 nm, 185 nm, 186 nm, 187 nm, 188 nm, 189 nm, 190 nm, 191 nm, 192 nm, 193 nm, 194 nm, 195 nm, 196 nm, 197 nm, 198 nm, 199 nm, 200 nm, 201 nm, 202 nm, 203 nm, 204 nm, 205 nm, 206 nm, 207 nm, 208 nm, 209 nm, 210 nm, 211 nm, 212 nm, 213 nm, 214 nm, 215 nm, 216 nm, 217 nm, 218 nm, 219 nm, or 220 nm; from 25 nm to: 26 nm, 27 nm, 28 nm, 29 nm, 30 nm, 31 nm, 32 nm, 33 nm, 34 nm, 35 nm, 36 nm, 37 nm, 38 nm, 39 nm, 40 nm, 41 nm, 42 nm, 43 nm, 44 nm, 45 nm, 46 nm, 47 nm, 48 nm, 49 nm, 50 nm, 51 nm, 52 nm, 53 nm, 54 nm, 55 nm, 56 nm, 57 nm, 58 nm, 59 nm, 60 nm, 61 nm, 62 nm, 63 nm, 64 nm, 65 nm, 66 nm, 67 nm, 68 nm, 69 nm, 70 nm, 71 nm, 72 nm, 73 nm, 74 nm, 75 nm, 76 nm, 77 nm, 78 nm, 79 nm, 80 nm, 81 nm, 82 nm, 83 nm, 84 nm, 85 nm, 86 nm, 87 nm, 88 nm, 89 nm, 90 nm, 91 nm, 92 nm, 93 nm, 94 nm, 95 nm, 96 nm, 97 nm, 98 nm, 99 nm, 100 nm, 101 nm, 102 nm, 103 nm, 104 nm, 105 nm, 106 nm, 107 nm, 108 nm, 109 nm, 110 nm, 111 nm, 112 nm, 113 nm, 114 nm, 115 nm, 116 nm, 117 nm, 118 nm, 119 nm, 120 nm, 121 nm, 122 nm, 123 nm, 124 nm, 125 nm, 126 nm, 127 nm, 128 nm, 129 nm, 130 nm, 131 nm, 132 nm, 133 nm, 134 nm, 135 nm, 136 nm, 137 nm, 138 nm, 139 nm, 140 nm, 141 nm, 142 nm, 143 nm, 144 nm, 145 nm, 146 nm, 147 nm, 148 nm, 149 nm, 150 nm, 151 nm, 152 nm, 153 nm, 154 nm, 155 nm, 156 nm, 157 nm, 158 nm, 159 nm, 160 nm, 161 nm, 162 nm, 163 nm, 164 nm, 165 nm, 166 nm, 167 nm, 168 nm, 169 nm, 170 nm, 171 nm, 172 nm, 173 nm, 174 nm, 175 nm, 176 nm, 177 nm, 178 nm, 179 nm, 180 nm, 181 nm, 182 nm, 183 nm, 184 nm, 185 nm, 186 nm, 187 nm, 188 nm, 189 nm, 190 nm, 191 nm, 192 nm, 193 nm, 194 nm, 195 nm, 196 nm, 197 nm, 198 nm, 199 nm, 200 nm, 201 nm, 202 nm, 203 nm, 204 nm, 205 nm, 206 nm, 207 nm, 208 nm, 209 nm, 210 nm, 211 nm, 212 nm, 213 nm, 214 nm, 215 nm, 216 nm, 217 nm, 218 nm, 219 nm, or 220 nm; from 30 nm to: 31 nm, 32 nm, 33 nm, 34 nm, 35 nm, 36 nm, 37 nm, 38 nm, 39 nm, 40 nm, 41 nm, 42 nm, 43 nm, 44 nm, 45 nm, 46 nm, 47 nm, 48 nm, 49 nm, 50 nm, 51 nm, 52 nm, 53 nm, 54 nm, 55 nm, 56 nm, 57 nm, 58 nm, 59 nm, 60 nm, 61 nm, 62 nm, 63 nm, 64 nm, 65 nm, 66 nm, 67 nm, 68 nm, 69 nm, 70 nm, 71 nm, 72 nm, 73 nm, 74 nm, 75 nm, 76 nm, 77 nm, 78 nm, 79 nm, 80 nm, 81 nm, 82 nm, 83 nm, 84 nm, 85 nm, 86 nm, 87 nm, 88 nm, 89 nm, 90 nm, 91 nm, 92 nm, 93 nm, 94 nm, 95 nm, 96 nm, 97 nm, 98 nm, 99 nm, 100 nm, 101 nm, 102 nm, 103 nm, 104 nm, 105 nm, 106 nm, 107 nm, 108 nm, 109 nm, 110 nm, 111 nm, 112 nm, 113 nm, 114 nm, 115 nm, 116 nm, 117 nm, 118 nm, 119 nm, 120 nm, 121 nm, 122 nm, 123 nm, 124 nm, 125 nm, 126 nm, 127 nm, 128 nm, 129 nm, 130 nm, 131 nm, 132 nm, 133 nm, 134 nm, 135 nm, 136 nm, 137 nm, 138 nm, 139 nm, 140 nm, 141 nm, 142 nm, 143 nm, 144 nm, 145 nm, 146 nm, 147 nm, 148 nm, 149 nm, 150 nm, 151 nm, 152 nm, 153 nm, 154 nm, 155 nm, 156 nm, 157 nm, 158 nm, 159 nm, 160 nm, 161 nm, 162 nm, 163 nm, 164 nm, 165 nm, 166 nm, 167 nm, 168 nm, 169 nm, 170 nm, 171 nm, 172 nm, 173 nm, 174 nm, 175 nm, 176 nm, 177 nm, 178 nm, 179 nm, 180 nm, 181 nm, 182 nm, 183 nm, 184 nm, 185 nm, 186 nm, 187 nm, 188 nm, 189 nm, 190 nm, 191 nm, 192 nm, 193 nm, 194 nm, 195 nm, 196 nm, 197 nm, 198 nm, 199 nm, 200 nm, 201 nm, 202 nm, 203 nm, 204 nm, 205 nm, 206 nm, 207 nm, 208 nm, 209 nm, 210 nm, 211 nm, 212 nm, 213 nm, 214 nm, 215 nm, 216 nm, 217 nm, 218 nm, 219 nm, or 220 nm; from 35 nm to: 36 nm, 37 nm, 38 nm, 39 nm, 40 nm, 41 nm, 42 nm, 43 nm, 44 nm, 45 nm, 46 nm, 47 nm, 48 nm, 49 nm, 50 nm, 51 nm, 52 nm, 53 nm, 54 nm, 55 nm, 56 nm, 57 nm, 58 nm, 59 nm, 60 nm, 61 nm, 62 nm, 63 nm, 64 nm, 65 nm, 66 nm, 67 nm, 68 nm, 69 nm, 70 nm, 71 nm, 72 nm, 73 nm, 74 nm, 75 nm, 76 nm, 77 nm, 78 nm, 79 nm, 80 nm, 81 nm, 82 nm, 83 nm, 84 nm, 85 nm, 86 nm, 87 nm, 88 nm, 89 nm, 90 nm, 91 nm, 92 nm, 93 nm, 94 nm, 95 nm, 96 nm, 97 nm, 98 nm, 99 nm, 100 nm, 101 nm, 102 nm, 103 nm, 104 nm, 105 nm, 106 nm, 107 nm, 108 nm, 109 nm, 110 nm, 111 nm, 112 nm, 113 nm, 114 nm, 115 nm, 116 nm, 117 nm, 118 nm, 119 nm, 120 nm, 121 nm, 122 nm, 123 nm, 124 nm, 125 nm, 126 nm, 127 nm, 128 nm, 129 nm, 130 nm, 131 nm, 132 nm, 133 nm, 134 nm, 135 nm, 136 nm, 137 nm, 138 nm, 139 nm, 140 nm, 141 nm, 142 nm, 143 nm, 144 nm, 145 nm, 146 nm, 147 nm, 148 nm, 149 nm, 150 nm, 151 nm, 152 nm, 153 nm, 154 nm, 155 nm, 156 nm, 157 nm, 158 nm, 159 nm, 160 nm, 161 nm, 162 nm, 163 nm, 164 nm, 165 nm, 166 nm, 167 nm, 168 nm, 169 nm, 170 nm, 171 nm, 172 nm, 173 nm, 174 nm, 175 nm, 176 nm, 177 nm, 178 nm, 179 nm, 180 nm, 181 nm, 182 nm, 183 nm, 184 nm, 185 nm, 186 nm, 187 nm, 188 nm, 189 nm, 190 nm, 191 nm, 192 nm, 193 nm, 194 nm, 195 nm, 196 nm, 197 nm, 198 nm, 199 nm, 200 nm, 201 nm, 202 nm, 203 nm, 204 nm, 205 nm, 206 nm, 207 nm, 208 nm, 209 nm, 210 nm, 211 nm, 212 nm, 213 nm, 214 nm, 215 nm, 216 nm, 217 nm, 218 nm, 219 nm, or 220 nm; from: 40 nm to: 41 nm, 42 nm, 43 nm, 44 nm, 45 nm, 46 nm, 47 nm, 48 nm, 49 nm, 50 nm, 51 nm, 52 nm, 53 nm, 54 nm, 55 nm, 56 nm, 57 nm, 58 nm, 59 nm, 60 nm, 61 nm, 62 nm, 63 nm, 64 nm, 65 nm, 66 nm, 67 nm, 68 nm, 69 nm, 70 nm, 71 nm, 72 nm, 73 nm, 74 nm, 75 nm, 76 nm, 77 nm, 78 nm, 79 nm, 80 nm, 81 nm, 82 nm, 83 nm, 84 nm, 85 nm, 86 nm, 87 nm, 88 nm, 89 nm, 90 nm, 91 nm, 92 nm, 93 nm, 94 nm, 95 nm, 96 nm, 97 nm, 98 nm, 99 nm, 100 nm, 101 nm, 102 nm, 103 nm, 104 nm, 105 nm, 106 nm, 107 nm, 108 nm, 109 nm, 110 nm, 111 nm, 112 nm, 113 nm, 114 nm, 115 nm, 116 nm, 117 nm, 118 nm, 119 nm, 120 nm, 121 nm, 122 nm, 123 nm, 124 nm, 125 nm, 126 nm, 127 nm, 128 nm, 129 nm, 130 nm, 131 nm, 132 nm, 133 nm, 134 nm, 135 nm, 136 nm, 137 nm, 138 nm, 139 nm, 140 nm, 141 nm, 142 nm, 143 nm, 144 nm, 145 nm, 146 nm, 147 nm, 148 nm, 149 nm, 150 nm, 151 nm, 152 nm, 153 nm, 154 nm, 155 nm, 156 nm, 157 nm, 158 nm, 159 nm, 160 nm, 161 nm, 162 nm, 163 nm, 164 nm, 165 nm, 166 nm, 167 nm, 168 nm, 169 nm, 170 nm, 171 nm, 172 nm, 173 nm, 174 nm, 175 nm, 176 nm, 177 nm, 178 nm, 179 nm, 180 nm, 181 nm, 182 nm, 183 nm, 184 nm, 185 nm, 186 nm, 187 nm, 188 nm, 189 nm, 190 nm, 191 nm, 192 nm, 193 nm, 194 nm, 195 nm, 196 nm, 197 nm, 198 nm, 199 nm, 200 nm, 201 nm, 202 nm, 203 nm, 204 nm, 205 nm, 206 nm, 207 nm, 208 nm, 209 nm, 210 nm, 211 nm, 212 nm, 213 nm, 214 nm, 215 nm, 216 nm, 217 nm, 218 nm, 219 nm, or 220 nm; from 45 nm to: 46 nm, 47 nm, 48 nm, 49 nm, 50 nm, 51 nm, 52 nm, 53 nm, 54 nm, 55 nm, 56 nm, 57 nm, 58 nm, 59 nm, 60 nm, 61 nm, 62 nm, 63 nm, 64 nm, 65 nm, 66 nm, 67 nm, 68 nm, 69 nm, 70 nm, 71 nm, 72 nm, 73 nm, 74 nm, 75 nm, 76 nm, 77 nm, 78 nm, 79 nm, 80 nm, 81 nm, 82 nm, 83 nm, 84 nm, 85 nm, 86 nm, 87 nm, 88 nm, 89 nm, 90 nm, 91 nm, 92 nm, 93 nm, 94 nm, 95 nm, 96 nm, 97 nm, 98 nm, 99 nm, 100 nm, 101 nm, 102 nm, 103 nm, 104 nm, 105 nm, 106 nm, 107 nm, 108 nm, 109 nm, 110 nm, 111 nm, 112 nm, 113 nm, 114 nm, 115 nm, 116 nm, 117 nm, 118 nm, 119 nm, 120 nm, 121 nm, 122 nm, 123 nm, 124 nm, 125 nm, 126 nm, 127 nm, 128 nm, 129 nm, 130 nm, 131 nm, 132 nm, 133 nm, 134 nm, 135 nm, 136 nm, 137 nm, 138 nm, 139 nm, 140 nm, 141 nm, 142 nm, 143 nm, 144 nm, 145 nm, 146 nm, 147 nm, 148 nm, 149 nm, 150 nm, 151 nm, 152 nm, 153 nm, 154 nm, 155 nm, 156 nm, 157 nm, 158 nm, 159 nm, 160 nm, 161 nm, 162 nm, 163 nm, 164 nm, 165 nm, 166 nm, 167 nm, 168 nm, 169 nm, 170 nm, 171 nm, 172 nm, 173 nm, 174 nm, 175 nm, 176 nm, 177 nm, 178 nm, 179 nm, 180 nm, 181 nm, 182 nm, 183 nm, 184 nm, 185 nm, 186 nm, 187 nm, 188 nm, 189 nm, 190 nm, 191 nm, 192 nm, 193 nm, 194 nm, 195 nm, 196 nm, 197 nm, 198 nm, 199 nm, 200 nm, 201 nm, 202 nm, 203 nm, 204 nm, 205 nm, 206 nm, 207 nm, 208 nm, 209 nm, 210 nm, 211 nm, 212 nm, 213 nm, 214 nm, 215 nm, 216 nm, 217 nm, 218 nm, 219 nm, or 220 nm; from 50 nm to: 51 nm, 52 nm, 53 nm, 54 nm, 55 nm, 56 nm, 57 nm, 58 nm, 59 nm, 60 nm, 61 nm, 62 nm, 63 nm, 64 nm, 65 nm, 66 nm, 67 nm, 68 nm, 69 nm, 70 nm, 71 nm, 72 nm, 73 nm, 74 nm, 75 nm, 76 nm, 77 nm, 78 nm, 79 nm, 80 nm, 81 nm, 82 nm, 83 nm, 84 nm, 85 nm, 86 nm, 87 nm, 88 nm, 89 nm, 90 nm, 91 nm, 92 nm, 93 nm, 94 nm, 95 nm, 96 nm, 97 nm, 98 nm, 99 nm, 100 nm, 101 nm, 102 nm, 103 nm, 104 nm, 105 nm, 106 nm, 107 nm, 108 nm, 109 nm, 110 nm, 111 nm, 112 nm, 113 nm, 114 nm, 115 nm, 116 nm, 117 nm, 118 nm, 119 nm, 120 nm, 121 nm, 122 nm, 123 nm, 124 nm, 125 nm, 126 nm, 127 nm, 128 nm, 129 nm, 130 nm, 131 nm, 132 nm, 133 nm, 134 nm, 135 nm, 136 nm, 137 nm, 138 nm, 139 nm, 140 nm, 141 nm, 142 nm, 143 nm, 144 nm, 145 nm, 146 nm, 147 nm, 148 nm, 149 nm, 150 nm, 151 nm, 152 nm, 153 nm, 154 nm, 155 nm, 156 nm, 157 nm, 158 nm, 159 nm, 160 nm, 161 nm, 162 nm, 163 nm, 164 nm, 165 nm, 166 nm, 167 nm, 168 nm, 169 nm, 170 nm, 171 nm, 172 nm, 173 nm, 174 nm, 175 nm, 176 nm, 177 nm, 178 nm, 179 nm, 180 nm, 181 nm, 182 nm, 183 nm, 184 nm, 185 nm, 186 nm, 187 nm, 188 nm, 189 nm, 190 nm, 191 nm, 192 nm, 193 nm, 194 nm, 195 nm, 196 nm, 197 nm, 198 nm, 199 nm, 200 nm, 201 nm, 202 nm, 203 nm, 204 nm, 205 nm, 206 nm, 207 nm, 208 nm, 209 nm, 210 nm, 211 nm, 212 nm, 213 nm, 214 nm, 215 nm, 216 nm, 217 nm, 218 nm, 219 nm, or 220 nm; from 55 nm to: 56 nm, 57 nm, 58 nm, 59 nm, 60 nm, 61 nm, 62 nm, 63 nm, 64 nm, 65 nm, 66 nm, 67 nm, 68 nm, 69 nm, 70 nm, 71 nm, 72 nm, 73 nm, 74 nm, 75 nm, 76 nm, 77 nm, 78 nm, 79 nm, 80 nm, 81 nm, 82 nm, 83 nm, 84 nm, 85 nm, 86 nm, 87 nm, 88 nm, 89 nm, 90 nm, 91 nm, 92 nm, 93 nm, 94 nm, 95 nm, 96 nm, 97 nm, 98 nm, 99 nm, 100 nm, 101 nm, 102 nm, 103 nm, 104 nm, 105 nm, 106 nm, 107 nm, 108 nm, 109 nm, 110 nm, 111 nm, 112 nm, 113 nm, 114 nm, 115 nm, 116 nm, 117 nm, 118 nm, 119 nm, 120 nm, 121 nm, 122 nm, 123 nm, 124 nm, 125 nm, 126 nm, 127 nm, 128 nm, 129 nm, 130 nm, 131 nm, 132 nm, 133 nm, 134 nm, 135 nm, 136 nm, 137 nm, 138 nm, 139 nm, 140 nm, 141 nm, 142 nm, 143 nm, 144 nm, 145 nm, 146 nm, 147 nm, 148 nm, 149 nm, 150 nm, 151 nm, 152 nm, 153 nm, 154 nm, 155 nm, 156 nm, 157 nm, 158 nm, 159 nm, 160 nm, 161 nm, 162 nm, 163 nm, 164 nm, 165 nm, 166 nm, 167 nm, 168 nm, 169 nm, 170 nm, 171 nm, 172 nm, 173 nm, 174 nm, 175 nm, 176 nm, 177 nm, 178 nm, 179 nm, 180 nm, 181 nm, 182 nm, 183 nm, 184 nm, 185 nm, 186 nm, 187 nm, 188 nm, 189 nm, 190 nm, 191 nm, 192 nm, 193 nm, 194 nm, 195 nm, 196 nm, 197 nm, 198 nm, 199 nm, 200 nm, 201 nm, 202 nm, 203 nm, 204 nm, 205 nm, 206 nm, 207 nm, 208 nm, 209 nm, 210 nm, 211 nm, 212 nm, 213 nm, 214 nm, 215 nm, 216 nm, 217 nm, 218 nm, 219 nm, or 220 nm; from 60 nm to: 61 nm, 62 nm, 63 nm, 64 nm, 65 nm, 66 nm, 67 nm, 68 nm, 69 nm, 70 nm, 71 nm, 72 nm, 73 nm, 74 nm, 75 nm, 76 nm, 77 nm, 78 nm, 79 nm, 80 nm, 81 nm, 82 nm, 83 nm, 84 nm, 85 nm, 86 nm, 87 nm, 88 nm, 89 nm, 90 nm, 91 nm, 92 nm, 93 nm, 94 nm, 95 nm, 96 nm, 97 nm, 98 nm, 99 nm, 100 nm, 101 nm, 102 nm, 103 nm, 104 nm, 105 nm, 106 nm, 107 nm, 108 nm, 109 nm, 110 nm, 111 nm, 112 nm, 113 nm, 114 nm, 115 nm, 116 nm, 117 nm, 118 nm, 119 nm, 120 nm, 121 nm, 122 nm, 123 nm, 124 nm, 125 nm, 126 nm, 127 nm, 128 nm, 129 nm, 130 nm, 131 nm, 132 nm, 133 nm, 134 nm, 135 nm, 136 nm, 137 nm, 138 nm, 139 nm, 140 nm, 141 nm, 142 nm, 143 nm, 144 nm, 145 nm, 146 nm, 147 nm, 148 nm, 149 nm, 150 nm, 151 nm, 152 nm, 153 nm, 154 nm, 155 nm, 156 nm, 157 nm, 158 nm, 159 nm, 160 nm, 161 nm, 162 nm, 163 nm, 164 nm, 165 nm, 166 nm, 167 nm, 168 nm, 169 nm, 170 nm, 171 nm, 172 nm, 173 nm, 174 nm, 175 nm, 176 nm, 177 nm, 178 nm, 179 nm, 180 nm, 181 nm, 182 nm, 183 nm, 184 nm, 185 nm, 186 nm, 187 nm, 188 nm, 189 nm, 190 nm, 191 nm, 192 nm, 193 nm, 194 nm, 195 nm, 196 nm, 197 nm, 198 nm, 199 nm, 200 nm, 201 nm, 202 nm, 203 nm, 204 nm, 205 nm, 206 nm, 207 nm, 208 nm, 209 nm, 210 nm, 211 nm, 212 nm, 213 nm, 214 nm, 215 nm, 216 nm, 217 nm, 218 nm, 219 nm, or 220 nm; from 65 nm to: 66 nm, 67 nm, 68 nm, 69 nm, 70 nm, 71 nm, 72 nm, 73 nm, 74 nm, 75 nm, 76 nm, 77 nm, 78 nm, 79 nm, 80 nm, 81 nm, 82 nm, 83 nm, 84 nm, 85 nm, 86 nm, 87 nm, 88 nm, 89 nm, 90 nm, 91 nm, 92 nm, 93 nm, 94 nm, 95 nm, 96 nm, 97 nm, 98 nm, 99 nm, 100 nm, 101 nm, 102 nm, 103 nm, 104 nm, 105 nm, 106 nm, 107 nm, 108 nm, 109 nm, 110 nm, 111 nm, 112 nm, 113 nm, 114 nm, 115 nm, 116 nm, 117 nm, 118 nm, 119 nm, 120 nm, 121 nm, 122 nm, 123 nm, 124 nm, 125 nm, 126 nm, 127 nm, 128 nm, 129 nm, 130 nm, 131 nm, 132 nm, 133 nm, 134 nm, 135 nm, 136 nm, 137 nm, 138 nm, 139 nm, 140 nm, 141 nm, 142 nm, 143 nm, 144 nm, 145 nm, 146 nm, 147 nm, 148 nm, 149 nm, 150 nm, 151 nm, 152 nm, 153 nm, 154 nm, 155 nm, 156 nm, 157 nm, 158 nm, 159 nm, 160 nm, 161 nm, 162 nm, 163 nm, 164 nm, 165 nm, 166 nm, 167 nm, 168 nm, 169 nm, 170 nm, 171 nm, 172 nm, 173 nm, 174 nm, 175 nm, 176 nm, 177 nm, 178 nm, 179 nm, 180 nm, 181 nm, 182 nm, 183 nm, 184 nm, 185 nm, 186 nm, 187 nm, 188 nm, 189 nm, 190 nm, 191 nm, 192 nm, 193 nm, 194 nm, 195 nm, 196 nm, 197 nm, 198 nm, 199 nm, 200 nm, 201 nm, 202 nm, 203 nm, 204 nm, 205 nm, 206 nm, 207 nm, 208 nm, 209 nm, 210 nm, 211 nm, 212 nm, 213 nm, 214 nm, 215 nm, 216 nm, 217 nm, 218 nm, 219 nm, or 220 nm; from 70 nm to: 71 nm, 72 nm, 73 nm, 74 nm, 75 nm, 76 nm, 77 nm, 78 nm, 79 nm, 80 nm, 81 nm, 82 nm, 83 nm, 84 nm, 85 nm, 86 nm, 87 nm, 88 nm, 89 nm, 90 nm, 91 nm, 92 nm, 93 nm, 94 nm, 95 nm, 96 nm, 97 nm, 98 nm, 99 nm, 100 nm, 101 nm, 102 nm, 103 nm, 104 nm, 105 nm, 106 nm, 107 nm, 108 nm, 109 nm, 110 nm, 111 nm, 112 nm, 113 nm, 114 nm, 115 nm, 116 nm, 117 nm, 118 nm, 119 nm, 120 nm, 121 nm, 122 nm, 123 nm, 124 nm, 125 nm, 126 nm, 127 nm, 128 nm, 129 nm, 130 nm, 131 nm, 132 nm, 133 nm, 134 nm, 135 nm, 136 nm, 137 nm, 138 nm, 139 nm, 140 nm, 141 nm, 142 nm, 143 nm, 144 nm, 145 nm, 146 nm, 147 nm, 148 nm, 149 nm, 150 nm, 151 nm, 152 nm, 153 nm, 154 nm, 155 nm, 156 nm, 157 nm, 158 nm, 159 nm, 160 nm, 161 nm, 162 nm, 163 nm, 164 nm, 165 nm, 166 nm, 167 nm, 168 nm, 169 nm, 170 nm, 171 nm, 172 nm, 173 nm, 174 nm, 175 nm, 176 nm, 177 nm, 178 nm, 179 nm, 180 nm, 181 nm, 182 nm, 183 nm, 184 nm, 185 nm, 186 nm, 187 nm, 188 nm, 189 nm, 190 nm, 191 nm, 192 nm, 193 nm, 194 nm, 195 nm, 196 nm, 197 nm, 198 nm, 199 nm, 200 nm, 201 nm, 202 nm, 203 nm, 204 nm, 205 nm, 206 nm, 207 nm, 208 nm, 209 nm, 210 nm, 211 nm, 212 nm, 213 nm, 214 nm, 215 nm, 216 nm, 217 nm, 218 nm, 219 nm, or 220 nm; from 75 nm to: 75 nm, 76 nm, 77 nm, 78 nm, 79 nm, 80 nm, 81 nm, 82 nm, 83 nm, 84 nm, 85 nm, 86 nm, 87 nm, 88 nm, 89 nm, 90 nm, 91 nm, 92 nm, 93 nm, 94 nm, 95 nm, 96 nm, 97 nm, 98 nm, 99 nm, 100 nm, 101 nm, 102 nm, 103 nm, 104 nm, 105 nm, 106 nm, 107 nm, 108 nm, 109 nm, 110 nm, 111 nm, 112 nm, 113 nm, 114 nm, 115 nm, 116 nm, 117 nm, 118 nm, 119 nm, 120 nm, 121 nm, 122 nm, 123 nm, 124 nm, 125 nm, 126 nm, 127 nm, 128 nm, 129 nm, 130 nm, 131 nm, 132 nm, 133 nm, 134 nm, 135 nm, 136 nm, 137 nm, 138 nm, 139 nm, 140 nm, 141 nm, 142 nm, 143 nm, 144 nm, 145 nm, 146 nm, 147 nm, 148 nm, 149 nm, 150 nm, 151 nm, 152 nm, 153 nm, 154 nm, 155 nm, 156 nm, 157 nm, 158 nm, 159 nm, 160 nm, 161 nm, 162 nm, 163 nm, 164 nm, 165 nm, 166 nm, 167 nm, 168 nm, 169 nm, 170 nm, 171 nm, 172 nm, 173 nm, 174 nm, 175 nm, 176 nm, 177 nm, 178 nm, 179 nm, 180 nm, 181 nm, 182 nm, 183 nm, 184 nm, 185 nm, 186 nm, 187 nm, 188 nm, 189 nm, 190 nm, 191 nm, 192 nm, 193 nm, 194 nm, 195 nm, 196 nm, 197 nm, 198 nm, 199 nm, 200 nm, 201 nm, 202 nm, 203 nm, 204 nm, 205 nm, 206 nm, 207 nm, 208 nm, 209 nm, 210 nm, 211 nm, 212 nm, 213 nm, 214 nm, 215 nm, 216 nm, 217 nm, 218 nm, 219 nm, or 220 nm; from 80 nm to: 81 nm, 82 nm, 83 nm, 84 nm, 85 nm, 86 nm, 87 nm, 88 nm, 89 nm, 90 nm, 91 nm, 92 nm, 93 nm, 94 nm, 95 nm, 96 nm, 97 nm, 98 nm, 99 nm, 100 nm, 101 nm, 102 nm, 103 nm, 104 nm, 105 nm, 106 nm, 107 nm, 108 nm, 109 nm, 110 nm, 111 nm, 112 nm, 113 nm, 114 nm, 115 nm, 116 nm, 117 nm, 118 nm, 119 nm, 120 nm, 121 nm, 122 nm, 123 nm, 124 nm, 125 nm, 126 nm, 127 nm, 128 nm, 129 nm, 130 nm, 131 nm, 132 nm, 133 nm, 134 nm, 135 nm, 136 nm, 137 nm, 138 nm, 139 nm, 140 nm, 141 nm, 142 nm, 143 nm, 144 nm, 145 nm, 146 nm, 147 nm, 148 nm, 149 nm, 150 nm, 151 nm, 152 nm, 153 nm, 154 nm, 155 nm, 156 nm, 157 nm, 158 nm, 159 nm, 160 nm, 161 nm, 162 nm, 163 nm, 164 nm, 165 nm, 166 nm, 167 nm, 168 nm, 169 nm, 170 nm, 171 nm, 172 nm, 173 nm, 174 nm, 175 nm, 176 nm, 177 nm, 178 nm, 179 nm, 180 nm, 181 nm, 182 nm, 183 nm, 184 nm, 185 nm, 186 nm, 187 nm, 188 nm, 189 nm, 190 nm, 191 nm, 192 nm, 193 nm, 194 nm, 195 nm, 196 nm, 197 nm, 198 nm, 199 nm, 200 nm, 201 nm, 202 nm, 203 nm, 204 nm, 205 nm, 206 nm, 207 nm, 208 nm, 209 nm, 210 nm, 211 nm, 212 nm, 213 nm, 214 nm, 215 nm, 216 nm, 217 nm, 218 nm, 219 nm, or 220 nm; or from 85 nm to: 86 nm, 87 nm, 88 nm, 89 nm, 90 nm, 91 nm, 92 nm, 93 nm, 94 nm, 95 nm, 96 nm, 97 nm, 98 nm, 99 nm, 100 nm, 101 nm, 102 nm, 103 nm, 104 nm, 105 nm, 106 nm, 107 nm, 108 nm, 109 nm, 110 nm, 111 nm, 112 nm, 113 nm, 114 nm, 115 nm, 116 nm, 117 nm, 118 nm, 119 nm, 120 nm, 121 nm, 122 nm, 123 nm, 124 nm, 125 nm, 126 nm, 127 nm, 128 nm, 129 nm, 130 nm, 131 nm, 132 nm, 133 nm, 134 nm, 135 nm, 136 nm, 137 nm, 138 nm, 139 nm, 140 nm, 141 nm, 142 nm, 143 nm, 144 nm, 145 nm, 146 nm, 147 nm, 148 nm, 149 nm, 150 nm, 151 nm, 152 nm, 153 nm, 154 nm, 155 nm, 156 nm, 157 nm, 158 nm, 159 nm, 160 nm, 161 nm, 162 nm, 163 nm, 164 nm, 165 nm, 166 nm, 167 nm, 168 nm, 169 nm, 170 nm, 171 nm, 172 nm, 173 nm, 174 nm, 175 nm, 176 nm, 177 nm, 178 nm, 179 nm, 180 nm, 181 nm, 182 nm, 183 nm, 184 nm, 185 nm, 186 nm, 187 nm, 188 nm, 189 nm, 190 nm, 191 nm, 192 nm, 193 nm, 194 nm, 195 nm, 196 nm, 197 nm, 198 nm, 199 nm, 200 nm, 201 nm, 202 nm, 203 nm, 204 nm, 205 nm, 206 nm, 207 nm, 208 nm, 209 nm, 210 nm, 211 nm, 212 nm, 213 nm, 214 nm, 215 nm, 216 nm, 217 nm, 218 nm, 219 nm, or 220 nm.

[0228] In some embodiments, the LNPs have a diameter from 20 nm to: 21 nm, 22 nm, 23 nm, 24 nm, 25 nm, 26 nm, 27 nm, 28 nm, 29 nm, 30 nm, 31 nm, 32 nm, 33 nm, 34 nm, 35 nm, 36 nm, 37 nm, 38 nm, 39 nm, 40 nm, 41 nm, 42 nm, 43 nm, 44 nm, 45 nm, 46 nm, 47 nm, 48 nm, 49 nm, 50 nm, 51 nm, 52 nm, 53 nm, 54 nm, 55 nm, 56 nm, 57 nm, 58 nm, 59 nm, 60 nm, 61 nm, 62 nm, 63 nm, 64 nm, 65 nm, 66 nm, 67 nm, 68 nm, 69 nm, 70 nm, 71 nm, 72 nm, 73 nm, 74 nm, 75 nm, 76 nm, 77 nm, 78 nm, 79 nm, 80 nm, 81 nm, 82 nm, 83 nm, 84 nm, 85 nm, 86 nm, 87 nm, 88 nm, 89 nm, 90 nm, 91 nm, 92 nm, 93 nm, 94 nm, 95 nm, 96 nm, 97 nm, 98 nm, 99 nm, 100 nm, 101 nm, 102 nm, 103 nm, 104 nm, 105 nm, 106 nm, 107 nm, 108 nm, 109 nm, 110 nm, 111 nm, 112 nm, 113 nm, 114 nm, 115 nm, 116 nm, 117 nm, 118 nm, 119 nm, 120 nm, 121 nm, 122 nm, 123 nm, 124 nm, 125 nm, 126 nm, 127 nm, 128 nm, 129 nm, 130 nm, 131 nm, 132 nm, 133 nm, 134 nm, 135 nm, 136 nm, 137 nm, 138 nm, 139 nm, 140 nm, 141 nm, 142 nm, 143 nm, 144 nm, 145 nm, 146 nm, 147 nm, 148 nm, 149 nm, 150 nm, 151 nm, 152 nm, 153 nm, 154 nm, 155 nm, 156 nm, 157 nm, 158 nm, 159 nm, 160 nm, 161 nm, 162 nm, 163 nm, 164 nm, 165 nm, 166 nm, 167 nm, 168 nm, 169 nm, 170 nm, 171 nm, 172 nm, 173 nm, 174 nm, 175 nm, 176 nm, 177 nm, 178 nm, 179 nm, 180 nm, 181 nm, 182 nm, 183 nm, 184 nm, 185 nm, 186 nm, 187 nm, 188 nm, 189 nm, 190 nm, 191 nm, 192 nm, 193 nm, 194 nm, 195 nm, 196 nm, 197 nm, 198 nm, 199 nm, 200 nm, 201 nm, 202 nm, 203 nm, 204 nm, 205 nm, 206 nm, 207 nm, 208 nm, 209 nm, 210 nm, 211 nm, 212 nm, 213 nm, 214 nm, 215 nm, 216 nm, 217 nm, 218 nm, 219 nm, or 220 nm; from 25 nm to: 26 nm, 27 nm, 28 nm, 29 nm, 30 nm, 31 nm, 32 nm, 33 nm, 34 nm, 35 nm, 36 nm, 37 nm, 38 nm, 39 nm, 40 nm, 41 nm, 42 nm, 43 nm, 44 nm, 45 nm, 46 nm, 47 nm, 48 nm, 49 nm, 50 nm, 51 nm, 52 nm, 53 nm, 54 nm, 55 nm, 56 nm, 57 nm, 58 nm, 59 nm, 60 nm, 61 nm, 62 nm, 63 nm, 64 nm, 65 nm, 66 nm, 67 nm, 68 nm, 69 nm, 70 nm, 71 nm, 72 nm, 73 nm, 74 nm, 75 nm, 76 nm, 77 nm, 78 nm, 79 nm, 80 nm, 81 nm, 82 nm, 83 nm, 84 nm, 85 nm, 86 nm, 87 nm, 88 nm, 89 nm, 90 nm, 91 nm, 92 nm, 93 nm, 94 nm, 95 nm, 96 nm, 97 nm, 98 nm, 99 nm, 100 nm, 101 nm, 102 nm, 103 nm, 104 nm, 105 nm, 106 nm, 107 nm, 108 nm, 109 nm, 110 nm, 111 nm, 112 nm, 113 nm, 114 nm, 115 nm, 116 nm, 117 nm, 118 nm, 119 nm, 120 nm, 121 nm, 122 nm, 123 nm, 124 nm, 125 nm, 126 nm, 127 nm, 128 nm, 129 nm, 130 nm, 131 nm, 132 nm, 133 nm, 134 nm, 135 nm, 136 nm, 137 nm, 138 nm, 139 nm, 140 nm, 141 nm, 142 nm, 143 nm, 144 nm, 145 nm, 146 nm, 147 nm, 148 nm, 149 nm, 150 nm, 151 nm, 152 nm, 153 nm, 154 nm, 155 nm, 156 nm, 157 nm, 158 nm, 159 nm, 160 nm, 161 nm, 162 nm, 163 nm, 164 nm, 165 nm, 166 nm, 167 nm, 168 nm, 169 nm, 170 nm, 171 nm, 172 nm, 173 nm, 174 nm, 175 nm, 176 nm, 177 nm, 178 nm, 179 nm, 180 nm, 181 nm, 182 nm, 183 nm, 184 nm, 185 nm, 186 nm, 187 nm, 188 nm, 189 nm, 190 nm, 191 nm, 192 nm, 193 nm, 194 nm, 195 nm, 196 nm, 197 nm, 198 nm, 199 nm, 200 nm, 201 nm, 202 nm, 203 nm, 204 nm, 205 nm, 206 nm, 207 nm, 208 nm, 209 nm, 210 nm, 211 nm, 212 nm, 213 nm, 214 nm, 215 nm, 216 nm, 217 nm, 218 nm, 219 nm, or 220 nm; from 30 nm to: 31 nm, 32 nm, 33 nm, 34 nm, 35 nm, 36 nm, 37 nm, 38 nm, 39 nm, 40 nm, 41 nm, 42 nm, 43 nm, 44 nm, 45 nm, 46 nm, 47 nm, 48 nm, 49 nm, 50 nm, 51 nm, 52 nm, 53 nm, 54 nm, 55 nm, 56 nm, 57 nm, 58 nm, 59 nm, 60 nm, 61 nm, 62 nm, 63 nm, 64 nm, 65 nm, 66 nm, 67 nm, 68 nm, 69 nm, 70 nm, 71 nm, 72 nm, 73 nm, 74 nm, 75 nm, 76 nm, 77 nm, 78 nm, 79 nm, 80 nm, 81 nm, 82 nm, 83 nm, 84 nm, 85 nm, 86 nm, 87 nm, 88 nm, 89 nm, 90 nm, 91 nm, 92 nm, 93 nm, 94 nm, 95 nm, 96 nm, 97 nm, 98 nm, 99 nm, 100 nm, 101 nm, 102 nm, 103 nm, 104 nm, 105 nm, 106 nm, 107 nm, 108 nm, 109 nm, 110 nm, 111 nm, 112 nm, 113 nm, 114 nm, 115 nm, 116 nm, 117 nm, 118 nm, 119 nm, 120 nm, 121 nm, 122 nm, 123 nm, 124 nm, 125 nm, 126 nm, 127 nm, 128 nm, 129 nm, 130 nm, 131 nm, 132 nm, 133 nm, 134 nm, 135 nm, 136 nm, 137 nm, 138 nm, 139 nm, 140 nm, 141 nm, 142 nm, 143 nm, 144 nm, 145 nm, 146 nm, 147 nm, 148 nm, 149 nm, 150 nm, 151 nm, 152 nm, 153 nm, 154 nm, 155 nm, 156 nm, 157 nm, 158 nm, 159 nm, 160 nm, 161 nm, 162 nm, 163 nm, 164 nm, 165 nm, 166 nm, 167 nm, 168 nm, 169 nm, 170 nm, 171 nm, 172 nm, 173 nm, 174 nm, 175 nm, 176 nm, 177 nm, 178 nm, 179 nm, 180 nm, 181 nm, 182 nm, 183 nm, 184 nm, 185 nm, 186 nm, 187 nm, 188 nm, 189 nm, 190 nm, 191 nm, 192 nm, 193 nm, 194 nm, 195 nm, 196 nm, 197 nm, 198 nm, 199 nm, 200 nm, 201 nm, 202 nm, 203 nm, 204 nm, 205 nm, 206 nm, 207 nm, 208 nm, 209 nm, 210 nm, 211 nm, 212 nm, 213 nm, 214 nm, 215 nm, 216 nm, 217 nm, 218 nm, 219 nm, or 220 nm; from 35 nm to: 36 nm, 37 nm, 38 nm, 39 nm, 40 nm, 41 nm, 42 nm, 43 nm, 44 nm, 45 nm, 46 nm, 47 nm, 48 nm, 49 nm, 50 nm, 51 nm, 52 nm, 53 nm, 54 nm, 55 nm, 56 nm, 57 nm, 58 nm, 59 nm, 60 nm, 61 nm, 62 nm, 63 nm, 64 nm, 65 nm, 66 nm, 67 nm, 68 nm, 69 nm, 70 nm, 71 nm, 72 nm, 73 nm, 74 nm, 75 nm, 76 nm, 77 nm, 78 nm, 79 nm, 80 nm, 81 nm, 82 nm, 83 nm, 84 nm, 85 nm, 86 nm, 87 nm, 88 nm, 89 nm, 90 nm, 91 nm, 92 nm, 93 nm, 94 nm, 95 nm, 96 nm, 97 nm, 98 nm, 99 nm, 100 nm, 101 nm, 102 nm, 103 nm, 104 nm, 105 nm, 106 nm, 107 nm, 108 nm, 109 nm, 110 nm, 111 nm, 112 nm, 113 nm, 114 nm, 115 nm, 116 nm, 117 nm, 118 nm, 119 nm, 120 nm, 121 nm, 122 nm, 123 nm, 124 nm, 125 nm, 126 nm, 127 nm, 128 nm, 129 nm, 130 nm, 131 nm, 132 nm, 133 nm, 134 nm, 135 nm, 136 nm, 137 nm, 138 nm, 139 nm, 140 nm, 141 nm, 142 nm, 143 nm, 144 nm, 145 nm, 146 nm, 147 nm, 148 nm, 149 nm, 150 nm, 151 nm, 152 nm, 153 nm, 154 nm, 155 nm, 156 nm, 157 nm, 158 nm, 159 nm, 160 nm, 161 nm, 162 nm, 163 nm, 164 nm, 165 nm, 166 nm, 167 nm, 168 nm, 169 nm, 170 nm, 171 nm, 172 nm, 173 nm, 174 nm, 175 nm, 176 nm, 177 nm, 178 nm, 179 nm, 180 nm, 181 nm, 182 nm, 183 nm, 184 nm, 185 nm, 186 nm, 187 nm, 188 nm, 189 nm, 190 nm, 191 nm, 192 nm, 193 nm, 194 nm, 195 nm, 196 nm, 197 nm, 198 nm, 199 nm, 200 nm, 201 nm, 202 nm, 203 nm, 204 nm, 205 nm, 206 nm, 207 nm, 208 nm, 209 nm, 210 nm, 211 nm, 212 nm, 213 nm, 214 nm, 215 nm, 216 nm, 217 nm, 218 nm, 219 nm, or 220 nm; from: 40 nm to: 41 nm, 42 nm, 43 nm, 44 nm, 45 nm, 46 nm, 47 nm, 48 nm, 49 nm, 50 nm, 51 nm, 52 nm, 53 nm, 54 nm, 55 nm, 56 nm, 57 nm, 58 nm, 59 nm, 60 nm, 61 nm, 62 nm, 63 nm, 64 nm, 65 nm, 66 nm, 67 nm, 68 nm, 69 nm, 70 nm, 71 nm, 72 nm, 73 nm, 74 nm, 75 nm, 76 nm, 77 nm, 78 nm, 79 nm, 80 nm, 81 nm, 82 nm, 83 nm, 84 nm, 85 nm, 86 nm, 87 nm, 88 nm, 89 nm, 90 nm, 91 nm, 92 nm, 93 nm, 94 nm, 95 nm, 96 nm, 97 nm, 98 nm, 99 nm, 100 nm, 101 nm, 102 nm, 103 nm, 104 nm, 105 nm, 106 nm, 107 nm, 108 nm, 109 nm, 110 nm, 111 nm, 112 nm, 113 nm, 114 nm, 115 nm, 116 nm, 117 nm, 118 nm, 119 nm, 120 nm, 121 nm, 122 nm, 123 nm, 124 nm, 125 nm, 126 nm, 127 nm, 128 nm, 129 nm, 130 nm, 131 nm, 132 nm, 133 nm, 134 nm, 135 nm, 136 nm, 137 nm, 138 nm, 139 nm, 140 nm, 141 nm, 142 nm, 143 nm, 144 nm, 145 nm, 146 nm, 147 nm, 148 nm, 149 nm, 150 nm, 151 nm, 152 nm, 153 nm, 154 nm, 155 nm, 156 nm, 157 nm, 158 nm, 159 nm, 160 nm, 161 nm, 162 nm, 163 nm, 164 nm, 165 nm, 166 nm, 167 nm, 168 nm, 169 nm, 170 nm, 171 nm, 172 nm, 173 nm, 174 nm, 175 nm, 176 nm, 177 nm, 178 nm, 179 nm, 180 nm, 181 nm, 182 nm, 183 nm, 184 nm, 185 nm, 186 nm, 187 nm, 188 nm, 189 nm, 190 nm, 191 nm, 192 nm, 193 nm, 194 nm, 195 nm, 196 nm, 197 nm, 198 nm, 199 nm, 200 nm, 201 nm, 202 nm, 203 nm, 204 nm, 205 nm, 206 nm, 207 nm, 208 nm, 209 nm, 210 nm, 211 nm, 212 nm, 213 nm, 214 nm, 215 nm, 216 nm, 217 nm, 218 nm, 219 nm, or 220 nm; from 45 nm to: 46 nm, 47 nm, 48 nm, 49 nm, 50 nm, 51 nm, 52 nm, 53 nm, 54 nm, 55 nm, 56 nm, 57 nm, 58 nm, 59 nm, 60 nm, 61 nm, 62 nm, 63 nm, 64 nm, 65 nm, 66 nm, 67 nm, 68 nm, 69 nm, 70 nm, 71 nm, 72 nm, 73 nm, 74 nm, 75 nm, 76 nm, 77 nm, 78 nm, 79 nm, 80 nm, 81 nm, 82 nm, 83 nm, 84 nm, 85 nm, 86 nm, 87 nm, 88 nm, 89 nm, 90 nm, 91 nm, 92 nm, 93 nm, 94 nm, 95 nm, 96 nm, 97 nm, 98 nm, 99 nm, 100 nm, 101 nm, 102 nm, 103 nm, 104 nm, 105 nm, 106 nm, 107 nm, 108 nm, 109 nm, 110 nm, 111 nm, 112 nm, 113 nm, 114 nm, 115 nm, 116 nm, 117 nm, 118 nm, 119 nm, 120 nm, 121 nm, 122 nm, 123 nm, 124 nm, 125 nm, 126 nm, 127 nm, 128 nm, 129 nm, 130 nm, 131 nm, 132 nm, 133 nm, 134 nm, 135 nm, 136 nm, 137 nm, 138 nm, 139 nm, 140 nm, 141 nm, 142 nm, 143 nm, 144 nm, 145 nm, 146 nm, 147 nm, 148 nm, 149 nm, 150 nm, 151 nm, 152 nm, 153 nm, 154 nm, 155 nm, 156 nm, 157 nm, 158 nm, 159 nm, 160 nm, 161 nm, 162 nm, 163 nm, 164 nm, 165 nm, 166 nm, 167 nm, 168 nm, 169 nm, 170 nm, 171 nm, 172 nm, 173 nm, 174 nm, 175 nm, 176 nm, 177 nm, 178 nm, 179 nm, 180 nm, 181 nm, 182 nm, 183 nm, 184 nm, 185 nm, 186 nm, 187 nm, 188 nm, 189 nm, 190 nm, 191 nm, 192 nm, 193 nm, 194 nm, 195 nm, 196 nm, 197 nm, 198 nm, 199 nm, 200 nm, 201 nm, 202 nm, 203 nm, 204 nm, 205 nm, 206 nm, 207 nm, 208 nm, 209 nm, 210 nm, 211 nm, 212 nm, 213 nm, 214 nm, 215 nm, 216 nm, 217 nm, 218 nm, 219 nm, or 220 nm; from 50 nm to: 51 nm, 52 nm, 53 nm, 54 nm, 55 nm, 56 nm, 57 nm, 58 nm, 59 nm, 60 nm, 61 nm, 62 nm, 63 nm, 64 nm, 65 nm, 66 nm, 67 nm, 68 nm, 69 nm, 70 nm, 71 nm, 72 nm, 73 nm, 74 nm, 75 nm, 76 nm, 77 nm, 78 nm, 79 nm, 80 nm, 81 nm, 82 nm, 83 nm, 84 nm, 85 nm, 86 nm, 87 nm, 88 nm, 89 nm, 90 nm, 91 nm, 92 nm, 93 nm, 94 nm, 95 nm, 96 nm, 97 nm, 98 nm, 99 nm, 100 nm, 101 nm, 102 nm, 103 nm, 104 nm, 105 nm, 106 nm, 107 nm, 108 nm, 109 nm, 110 nm, 111 nm, 112 nm, 113 nm, 114 nm, 115 nm, 116 nm, 117 nm, 118 nm, 119 nm, 120 nm, 121 nm, 122 nm, 123 nm, 124 nm, 125 nm, 126 nm, 127 nm, 128 nm, 129 nm, 130 nm, 131 nm, 132 nm, 133 nm, 134 nm, 135 nm, 136 nm, 137 nm, 138 nm, 139 nm, 140 nm, 141 nm, 142 nm, 143 nm, 144 nm, 145 nm, 146 nm, 147 nm, 148 nm, 149 nm, 150 nm, 151 nm, 152 nm, 153 nm, 154 nm, 155 nm, 156 nm, 157 nm, 158 nm, 159 nm, 160 nm, 161 nm, 162 nm, 163 nm, 164 nm, 165 nm, 166 nm, 167 nm, 168 nm, 169 nm, 170 nm, 171 nm, 172 nm, 173 nm, 174 nm, 175 nm, 176 nm, 177 nm, 178 nm, 179 nm, 180 nm, 181 nm, 182 nm, 183 nm, 184 nm, 185 nm, 186 nm, 187 nm, 188 nm, 189 nm, 190 nm, 191 nm, 192 nm, 193 nm, 194 nm, 195 nm, 196 nm, 197 nm, 198 nm, 199 nm, 200 nm, 201 nm, 202 nm, 203 nm, 204 nm, 205 nm, 206 nm, 207 nm, 208 nm, 209 nm, 210 nm, 211 nm, 212 nm, 213 nm, 214 nm, 215 nm, 216 nm, 217 nm, 218 nm, 219 nm, or 220 nm; from 55 nm to: 56 nm, 57 nm, 58 nm, 59 nm, 60 nm, 61 nm, 62 nm, 63 nm, 64 nm, 65 nm, 66 nm, 67 nm, 68 nm, 69 nm, 70 nm, 71 nm, 72 nm, 73 nm, 74 nm, 75 nm, 76 nm, 77 nm, 78 nm, 79 nm, 80 nm, 81 nm, 82 nm, 83 nm, 84 nm, 85 nm, 86 nm, 87 nm, 88 nm, 89 nm, 90 nm, 91 nm, 92 nm, 93 nm, 94 nm, 95 nm, 96 nm, 97 nm, 98 nm, 99 nm, 100 nm, 101 nm, 102 nm, 103 nm, 104 nm, 105 nm, 106 nm, 107 nm, 108 nm, 109 nm, 110 nm, 111 nm, 112 nm, 113 nm, 114 nm, 115 nm, 116 nm, 117 nm, 118 nm, 119 nm, 120 nm, 121 nm, 122 nm, 123 nm, 124 nm, 125 nm, 126 nm, 127 nm, 128 nm, 129 nm, 130 nm, 131 nm, 132 nm, 133 nm, 134 nm, 135 nm, 136 nm, 137 nm, 138 nm, 139 nm, 140 nm, 141 nm, 142 nm, 143 nm, 144 nm, 145 nm, 146 nm, 147 nm, 148 nm, 149 nm, 150 nm, 151 nm, 152 nm, 153 nm, 154 nm, 155 nm, 156 nm, 157 nm, 158 nm, 159 nm, 160 nm, 161 nm, 162 nm, 163 nm, 164 nm, 165 nm, 166 nm, 167 nm, 168 nm, 169 nm, 170 nm, 171 nm, 172 nm, 173 nm, 174 nm, 175 nm, 176 nm, 177 nm, 178 nm, 179 nm, 180 nm, 181 nm, 182 nm, 183 nm, 184 nm, 185 nm, 186 nm, 187 nm, 188 nm, 189 nm, 190 nm, 191 nm, 192 nm, 193 nm, 194 nm, 195 nm, 196 nm, 197 nm, 198 nm, 199 nm, 200 nm, 201 nm, 202 nm, 203 nm, 204 nm, 205 nm, 206 nm, 207 nm, 208 nm, 209 nm, 210 nm, 211 nm, 212 nm, 213 nm, 214 nm, 215 nm, 216 nm, 217 nm, 218 nm, 219 nm, or 220 nm; from 60 nm to: 61 nm, 62 nm, 63 nm, 64 nm, 65 nm, 66 nm, 67 nm, 68 nm, 69 nm, 70 nm, 71 nm, 72 nm, 73 nm, 74 nm, 75 nm, 76 nm, 77 nm, 78 nm, 79 nm, 80 nm, 81 nm, 82 nm, 83 nm, 84 nm, 85 nm, 86 nm, 87 nm, 88 nm, 89 nm, 90 nm, 91 nm, 92 nm, 93 nm, 94 nm, 95 nm, 96 nm, 97 nm, 98 nm, 99 nm, 100 nm, 101 nm, 102 nm, 103 nm, 104 nm, 105 nm, 106 nm, 107 nm, 108 nm, 109 nm, 110 nm, 111 nm, 112 nm, 113 nm, 114 nm, 115 nm, 116 nm, 117 nm, 118 nm, 119 nm, 120 nm, 121 nm, 122 nm, 123 nm, 124 nm, 125 nm, 126 nm, 127 nm, 128 nm, 129 nm, 130 nm, 131 nm, 132 nm, 133 nm, 134 nm, 135 nm, 136 nm, 137 nm, 138 nm, 139 nm, 140 nm, 141 nm, 142 nm, 143 nm, 144 nm, 145 nm, 146 nm, 147 nm, 148 nm, 149 nm, 150 nm, 151 nm, 152 nm, 153 nm, 154 nm, 155 nm, 156 nm, 157 nm, 158 nm, 159 nm, 160 nm, 161 nm, 162 nm, 163 nm, 164 nm, 165 nm, 166 nm, 167 nm, 168 nm, 169 nm, 170 nm, 171 nm, 172 nm, 173 nm, 174 nm, 175 nm, 176 nm, 177 nm, 178 nm, 179 nm, 180 nm, 181 nm, 182 nm, 183 nm, 184 nm, 185 nm, 186 nm, 187 nm, 188 nm, 189 nm, 190 nm, 191 nm, 192 nm, 193 nm, 194 nm, 195 nm, 196 nm, 197 nm, 198 nm, 199 nm, 200 nm, 201 nm, 202 nm, 203 nm, 204 nm, 205 nm, 206 nm, 207 nm, 208 nm, 209 nm, 210 nm, 211 nm, 212 nm, 213 nm, 214 nm, 215 nm, 216 nm, 217 nm, 218 nm, 219 nm, or 220 nm; from 65 nm to: 66 nm, 67 nm, 68 nm, 69 nm, 70 nm, 71 nm, 72 nm, 73 nm, 74 nm, 75 nm, 76 nm, 77 nm, 78 nm, 79 nm, 80 nm, 81 nm, 82 nm, 83 nm, 84 nm, 85 nm, 86 nm, 87 nm, 88 nm, 89 nm, 90 nm, 91 nm, 92 nm, 93 nm, 94 nm, 95 nm, 96 nm, 97 nm, 98 nm, 99 nm, 100 nm, 101 nm, 102 nm, 103 nm, 104 nm, 105 nm, 106 nm, 107 nm, 108 nm, 109 nm, 110 nm, 111 nm, 112 nm, 113 nm, 114 nm, 115 nm, 116 nm, 117 nm, 118 nm, 119 nm, 120 nm, 121 nm, 122 nm, 123 nm, 124 nm, 125 nm, 126 nm, 127 nm, 128 nm, 129 nm, 130 nm, 131 nm, 132 nm, 133 nm, 134 nm, 135 nm, 136 nm, 137 nm, 138 nm, 139 nm, 140 nm, 141 nm, 142 nm, 143 nm, 144 nm, 145 nm, 146 nm, 147 nm, 148 nm, 149 nm, 150 nm, 151 nm, 152 nm, 153 nm, 154 nm, 155 nm, 156 nm, 157 nm, 158 nm, 159 nm, 160 nm, 161 nm, 162 nm, 163 nm, 164 nm, 165 nm, 166 nm, 167 nm, 168 nm, 169 nm, 170 nm, 171 nm, 172 nm, 173 nm, 174 nm, 175 nm, 176 nm, 177 nm, 178 nm, 179 nm, 180 nm, 181 nm, 182 nm, 183 nm, 184 nm, 185 nm, 186 nm, 187 nm, 188 nm, 189 nm, 190 nm, 191 nm, 192 nm, 193 nm, 194 nm, 195 nm, 196 nm, 197 nm, 198 nm, 199 nm, 200 nm, 201 nm, 202 nm, 203 nm, 204 nm, 205 nm, 206 nm, 207 nm, 208 nm, 209 nm, 210 nm, 211 nm, 212 nm, 213 nm, 214 nm, 215 nm, 216 nm, 217 nm, 218 nm, 219 nm, or 220 nm; from 70 nm to: 71 nm, 72 nm, 73 nm, 74 nm, 75 nm, 76 nm, 77 nm, 78 nm, 79 nm, 80 nm, 81 nm, 82 nm, 83 nm, 84 nm, 85 nm, 86 nm, 87 nm, 88 nm, 89 nm, 90 nm, 91 nm, 92 nm, 93 nm, 94 nm, 95 nm, 96 nm, 97 nm, 98 nm, 99 nm, 100 nm, 101 nm, 102 nm, 103 nm, 104 nm, 105 nm, 106 nm, 107 nm, 108 nm, 109 nm, 110 nm, 111 nm, 112 nm, 113 nm, 114 nm, 115 nm, 116 nm, 117 nm, 118 nm, 119 nm, 120 nm, 121 nm, 122 nm, 123 nm, 124 nm, 125 nm, 126 nm, 127 nm, 128 nm, 129 nm, 130 nm, 131 nm, 132 nm, 133 nm, 134 nm, 135 nm, 136 nm, 137 nm, 138 nm, 139 nm, 140 nm, 141 nm, 142 nm, 143 nm, 144 nm, 145 nm, 146 nm, 147 nm, 148 nm, 149 nm, 150 nm, 151 nm, 152 nm, 153 nm, 154 nm, 155 nm, 156 nm, 157 nm, 158 nm, 159 nm, 160 nm, 161 nm, 162 nm, 163 nm, 164 nm, 165 nm, 166 nm, 167 nm, 168 nm, 169 nm, 170 nm, 171 nm, 172 nm, 173 nm, 174 nm, 175 nm, 176 nm, 177 nm, 178 nm, 179 nm, 180 nm, 181 nm, 182 nm, 183 nm, 184 nm, 185 nm, 186 nm, 187 nm, 188 nm, 189 nm, 190 nm, 191 nm, 192 nm, 193 nm, 194 nm, 195 nm, 196 nm, 197 nm, 198 nm, 199 nm, 200 nm, 201 nm, 202 nm, 203 nm, 204 nm, 205 nm, 206 nm, 207 nm, 208 nm, 209 nm, 210 nm, 211 nm, 212 nm, 213 nm, 214 nm, 215 nm, 216 nm, 217 nm, 218 nm, 219 nm, or 220 nm; from 75 nm to: 75 nm, 76 nm, 77 nm, 78 nm, 79 nm, 80 nm, 81 nm, 82 nm, 83 nm, 84 nm, 85 nm, 86 nm, 87 nm, 88 nm, 89 nm, 90 nm, 91 nm, 92 nm, 93 nm, 94 nm, 95 nm, 96 nm, 97 nm, 98 nm, 99 nm, 100 nm, 101 nm, 102 nm, 103 nm, 104 nm, 105 nm, 106 nm, 107 nm, 108 nm, 109 nm, 110 nm, 111 nm, 112 nm, 113 nm, 114 nm, 115 nm, 116 nm, 117 nm, 118 nm, 119 nm, 120 nm, 121 nm, 122 nm, 123 nm, 124 nm, 125 nm, 126 nm, 127 nm, 128 nm, 129 nm, 130 nm, 131 nm, 132 nm, 133 nm, 134 nm, 135 nm, 136 nm, 137 nm, 138 nm, 139 nm, 140 nm, 141 nm, 142 nm, 143 nm, 144 nm, 145 nm, 146 nm, 147 nm, 148 nm, 149 nm, 150 nm, 151 nm, 152 nm, 153 nm, 154 nm, 155 nm, 156 nm, 157 nm, 158 nm, 159 nm, 160 nm, 161 nm, 162 nm, 163 nm, 164 nm, 165 nm, 166 nm, 167 nm, 168 nm, 169 nm, 170 nm, 171 nm, 172 nm, 173 nm, 174 nm, 175 nm, 176 nm, 177 nm, 178 nm, 179 nm, 180 nm, 181 nm, 182 nm, 183 nm, 184 nm, 185 nm, 186 nm, 187 nm, 188 nm, 189 nm, 190 nm, 191 nm, 192 nm, 193 nm, 194 nm, 195 nm, 196 nm, 197 nm, 198 nm, 199 nm, 200 nm, 201 nm, 202 nm, 203 nm, 204 nm, 205 nm, 206 nm, 207 nm, 208 nm, 209 nm, 210 nm, 211 nm, 212 nm, 213 nm, 214 nm, 215 nm, 216 nm, 217 nm, 218 nm, 219 nm, or 220 nm; from 80 nm to: 81 nm, 82 nm, 83 nm, 84 nm, 85 nm, 86 nm, 87 nm, 88 nm, 89 nm, 90 nm, 91 nm, 92 nm, 93 nm, 94 nm, 95 nm, 96 nm, 97 nm, 98 nm, 99 nm, 100 nm, 101 nm, 102 nm, 103 nm, 104 nm, 105 nm, 106 nm, 107 nm, 108 nm, 109 nm, 110 nm, 111 nm, 112 nm, 113 nm, 114 nm, 115 nm, 116 nm, 117 nm, 118 nm, 119 nm, 120 nm, 121 nm, 122 nm, 123 nm, 124 nm, 125 nm, 126 nm, 127 nm, 128 nm, 129 nm, 130 nm, 131 nm, 132 nm, 133 nm, 134 nm, 135 nm, 136 nm, 137 nm, 138 nm, 139 nm, 140 nm, 141 nm, 142 nm, 143 nm, 144 nm, 145 nm, 146 nm, 147 nm, 148 nm, 149 nm, 150 nm, 151 nm, 152 nm, 153 nm, 154 nm, 155 nm, 156 nm, 157 nm, 158 nm, 159 nm, 160 nm, 161 nm, 162 nm, 163 nm, 164 nm, 165 nm, 166 nm, 167 nm, 168 nm, 169 nm, 170 nm, 171 nm, 172 nm, 173 nm, 174 nm, 175 nm, 176 nm, 177 nm, 178 nm, 179 nm, 180 nm, 181 nm, 182 nm, 183 nm, 184 nm, 185 nm, 186 nm, 187 nm, 188 nm, 189 nm, 190 nm, 191 nm, 192 nm, 193 nm, 194 nm, 195 nm, 196 nm, 197 nm, 198 nm, 199 nm, 200 nm, 201 nm, 202 nm, 203 nm, 204 nm, 205 nm, 206 nm, 207 nm, 208 nm, 209 nm, 210 nm, 211 nm, 212 nm, 213 nm, 214 nm, 215 nm, 216 nm, 217 nm, 218 nm, 219 nm, or 220 nm; or from 85 nm to: 86 nm, 87 nm, 88 nm, 89 nm, 90 nm, 91 nm, 92 nm, 93 nm, 94 nm, 95 nm, 96 nm, 97 nm, 98 nm, 99 nm, 100 nm, 101 nm, 102 nm, 103 nm, 104 nm, 105 nm, 106 nm, 107 nm, 108 nm, 109 nm, 110 nm, 111 nm, 112 nm, 113 nm, 114 nm, 115 nm, 116 nm, 117 nm, 118 nm, 119 nm, 120 nm, 121 nm, 122 nm, 123 nm, 124 nm, 125 nm, 126 nm, 127 nm, 128 nm, 129 nm, 130 nm, 131 nm, 132 nm, 133 nm, 134 nm, 135 nm, 136 nm, 137 nm, 138 nm, 139 nm, 140 nm, 141 nm, 142 nm, 143 nm, 144 nm, 145 nm, 146 nm, 147 nm, 148 nm, 149 nm, 150 nm, 151 nm, 152 nm, 153 nm, 154 nm, 155 nm, 156 nm, 157 nm, 158 nm, 159 nm, 160 nm, 161 nm, 162 nm, 163 nm, 164 nm, 165 nm, 166 nm, 167 nm, 168 nm, 169 nm, 170 nm, 171 nm, 172 nm, 173 nm, 174 nm, 175 nm, 176 nm, 177 nm, 178 nm, 179 nm, 180 nm, 181 nm, 182 nm, 183 nm, 184 nm, 185 nm, 186 nm, 187 nm, 188 nm, 189 nm, 190 nm, 191 nm, 192 nm, 193 nm, 194 nm, 195 nm, 196 nm, 197 nm, 198 nm, 199 nm, 200 nm, 201 nm, 202 nm, 203 nm, 204 nm, 205 nm, 206 nm, 207 nm, 208 nm, 209 nm, 210 nm, 211 nm, 212 nm, 213 nm, 214 nm, 215 nm, 216 nm, 217 nm, 218 nm, 219 nm, or 220 nm.

[0229] Taking the above-noted embodiments into account, it is contemplated and supported that any of the above-noted “diameters of no more than” and “diameters of at least” may be combined to provide an enclosed range (i.e. 80% of the LNP have a diameter from 50 nm to 80 nm). Also contemplated and supported are combinations of the above-noted “diameter no more than” or “diameter of at least” with the diameters of the LNP formulations provided in the Examples section of this document. Also contemplated and supported are combinations of the diameters of the LNP formulation section of this document to provide a range (i.e. a cation-ionizable lipid having a diameter of from [the diameter of LNP formulation X₁ in the Examples] to [the LNP formulation X₂ in the Examples] wherein X₁ and X₂ represent any two exemplary LNP formulations of the Examples.

[0230] In some embodiments, LNP has a pKa of at least: 5.0, 5.1, 5.2, 5.3, 5.4, 5.5, 5.6, 5.7, 5.8, 5.9, 6.0, 6.1, 6.2, 6.3, 6.4, 6.5, 6.6, 6.7, 6.8, 6.9, 7.0, 7.1, 7.2, 7.3, 7.4, 7.5, 7.6, 7.7, 7.8, 7.9, 8.0, 8.1, 8.2, 8.3, 8.4, 8.5, 8.6, 8.7, 8.8, 8.9, 9.0, 9.1, 9.2, 9.3, 9.4, 9.5, 9.6, 9.7, 9.8, 9.9, or 10. In embodiments, the LNP has a pKa of no more than: 10, 9.9, 9.8, 9.7, 9.6, 9.5, 9.4, 9.3, 9.2, 9.1, 9.0, 8.9, 8.8, 8.7, 8.6, 8.5, 8.4, 8.3, 8.2, 8.1, 8.0, 7.9, 7.8, 7.7, 7.6, 7.5, 7.4, 7.3, 7.2, 7.1, 7.0, 6.9, 6.8, 6.7, 6.6, 6.5, 6.4, 6.3, 6.2, 6.1, 6.0, 5.9, 5.8, 5.7, 5.6, 5.5, 5.4, 5.3, 5.2, 5.1, or 5.0. In some embodiments, LNP has a pKa from 5.0 to: 5.1, 5.2, 5.3, 5.4, 5.5, 5.6, 5.7, 5.8, 5.9, 6.0, 6.1, 6.2, 6.3, 6.4, 6.5, 6.6, 6.7, 6.8, 6.9, 7.0, 7.1, 7.2, 7.3, 7.4, 7.5, 7.6, 7.7, 7.8, 7.9, 8.0, 8.1, 8.2, 8.3, 8.4, 8.5, 8.6, 8.7, 8.8, 8.9, 9.0, 9.1, 9.2, 9.3, 9.4, 9.5, 9.6, 9.7, 9.8, 9.9, or 10; from 5.1 to: 5.2, 5.3, 5.4, 5.5, 5.6, 5.7, 5.8, 5.9, 6.0, 6.1, 6.2, 6.3, 6.4, 6.5, 6.6, 6.7, 6.8, 6.9, 7.0, 7.1, 7.2, 7.3, 7.4, 7.5, 7.6, 7.7, 7.8, 7.9, 8.0, 8.1, 8.2, 8.3, 8.4, 8.5, 8.6, 8.7, 8.8, 8.9, 9.0, 9.1, 9.2, 9.3, 9.4, 9.5, 9.6, 9.7, 9.8, 9.9, or 10; from 5.3 to: 5.4, 5.5, 5.6, 5.7, 5.8, 5.9, 6.0, 6.1, 6.2, 6.3, 6.4, 6.5, 6.6, 6.7, 6.8, 6.9, 7.0, 7.1, 7.2, 7.3, 7.4, 7.5, 7.6, 7.7, 7.8, 7.9, 8.0, 8.1, 8.2, 8.3, 8.4, 8.5, 8.6, 8.7, 8.8, 8.9, 9.0, 9.1, 9.2, 9.3, 9.4, 9.5, 9.6, 9.7, 9.8, 9.9, or 10; from 5.4 to: 5.5, 5.6, 5.7, 5.8, 5.9, 6.0, 6.1, 6.2, 6.3, 6.4, 6.5, 6.6, 6.7, 6.8, 6.9, 7.0, 7.1, 7.2, 7.3, 7.4, 7.5, 7.6, 7.7, 7.8, 7.9, 8.0, 8.1, 8.2, 8.3, 8.4, 8.5, 8.6, 8.7, 8.8, 8.9, 9.0, 9.1, 9.2, 9.3, 9.4, 9.5, 9.6, 9.7, 9.8, 9.9, or 10; from 5.5 to: 5.6, 5.7, 5.8, 5.9, 6.0, 6.1, 6.2, 6.3, 6.4, 6.5, 6.6, 6.7, 6.8, 6.9, 7.0, 7.1, 7.2, 7.3, 7.4, 7.5, 7.6, 7.7, 7.8, 7.9, 8.0, 8.1, 8.2, 8.3, 8.4, 8.5, 8.6, 8.7, 8.8, 8.9, 9.0, 9.1, 9.2, 9.3, 9.4, 9.5, 9.6, 9.7, 9.8, 9.9, or 10; from 5.6 to: 5.7, 5.8, 5.9, 6.0, 6.1, 6.2, 6.3, 6.4, 6.5, 6.6, 6.7, 6.8, 6.9, 7.0, 7.1, 7.2, 7.3, 7.4, 7.5, 7.6, 7.7, 7.8, 7.9, 8.0, 8.1, 8.2, 8.3, 8.4, 8.5, 8.6, 8.7, 8.8, 8.9, 9.0, 9.1, 9.2, 9.3, 9.4, 9.5, 9.6, 9.7, 9.8, 9.9, or 10; from 5.7 to: 5.8, 5.9, 6.0, 6.1, 6.2, 6.3, 6.4, 6.5, 6.6, 6.7, 6.8, 6.9, 7.0, 7.1, 7.2, 7.3, 7.4, 7.5, 7.6, 7.7, 7.8, 7.9, 8.0, 8.1, 8.2, 8.3, 8.4, 8.5, 8.6, 8.7, 8.8, 8.9, 9.0, 9.1, 9.2, 9.3, 9.4, 9.5, 9.6, 9.7, 9.8, 9.9, or 10; from: 5.8 to: 5.9, 6.0, 6.1, 6.2, 6.3, 6.4, 6.5, 6.6, 6.7, 6.8, 6.9, 7.0, 7.1, 7.2, 7.3, 7.4, 7.5, 7.6, 7.7, 7.8, 7.9, 8.0, 8.1, 8.2, 8.3, 8.4, 8.5, 8.6, 8.7, 8.8, 8.9, 9.0, 9.1, 9.2, 9.3, 9.4, 9.5, 9.6, 9.7, 9.8, 9.9, or 10; from 5.9 to: 6.0, 6.1, 6.2, 6.3, 6.4, 6.5, 6.6, 6.7, 6.8, 6.9, 7.0, 7.1, 7.2, 7.3, 7.4, 7.5, 7.6, 7.7, 7.8, 7.9, 8.0, 8.1, 8.2, 8.3, 8.4, 8.5, 8.6, 8.7, 8.8, 8.9, 9.0, 9.1, 9.2, 9.3, 9.4, 9.5, 9.6, 9.7, 9.8, 9.9, or 10; from 6.0 to: 6.1, 6.2, 6.3, 6.4, 6.5, 6.6, 6.7, 6.8, 6.9, 7.0, 7.1, 7.2, 7.3, 7.4, 7.5, 7.6, 7.7, 7.8, 7.9, 8.0, 8.1, 8.2, 8.3, 8.4, 8.5, 8.6, 8.7, 8.8, 8.9, 9.0, 9.1, 9.2, 9.3, 9.4, 9.5, 9.6, 9.7, 9.8, 9.9, or 10; from 6.1 to: 6.2, 6.3, 6.4, 6.5, 6.6, 6.7, 6.8, 6.9, 7.0, 7.1, 7.2, 7.3, 7.4, 7.5, 7.6, 7.7, 7.8, 7.9, 8.0, 8.1, 8.2, 8.3, 8.4, 8.5, 8.6, 8.7, 8.8, 8.9, 9.0, 9.1, 9.2, 9.3, 9.4, 9.5, 9.6, 9.7, 9.8, 9.9, or 10; from: 6.2 to: 6.3, 6.4, 6.5, 6.6, 6.7, 6.8, 6.9, 7.0, 7.1, 7.2, 7.3, 7.4, 7.5, 7.6, 7.7, 7.8, 7.9, 8.0, 8.1, 8.2, 8.3, 8.4, 8.5, 8.6, 8.7, 8.8, 8.9, 9.0, 9.1, 9.2, 9.3, 9.4, 9.5, 9.6, 9.7, 9.8, 9.9, or 10; from 6.3 to: 6.4, 6.5, 6.6, 6.7, 6.8, 6.9, 7.0, 7.1, 7.2, 7.3, 7.4, 7.5, 7.6, 7.7, 7.8, 7.9, 8.0, 8.1, 8.2, 8.3, 8.4, 8.5, 8.6, 8.7, 8.8, 8.9, 9.0, 9.1, 9.2, 9.3, 9.4, 9.5, 9.6, 9.7, 9.8, 9.9, or 10; from 6.4 to: 6.5, 6.6, 6.7, 6.8, 6.9, 7.0, 7.1, 7.2, 7.3, 7.4, 7.5, 7.6, 7.7, 7.8, 7.9, 8.0, 8.1, 8.2, 8.3, 8.4, 8.5, 8.6, 8.7, 8.8, 8.9, 9.0, 9.1, 9.2, 9.3, 9.4, 9.5, 9.6, 9.7, 9.8, 9.9, or 10; from 6.5 to: 6.6, 6.7, 6.8, 6.9, 7.0, 7.1, 7.2, 7.3, 7.4, 7.5, 7.6, 7.7, 7.8, 7.9, 8.0, 8.1, 8.2, 8.3, 8.4, 8.5, 8.6, 8.7, 8.8, 8.9, 9.0, 9.1, 9.2, 9.3, 9.4, 9.5, 9.6, 9.7, 9.8, 9.9, or 10; from 6.6 to: 6.7, 6.8, 6.9, 7.0, 7.1, 7.2, 7.3, 7.4, 7.5, 7.6, 7.7, 7.8, 7.9, 8.0, 8.1, 8.2, 8.3, 8.4, 8.5, 8.6, 8.7, 8.8, 8.9, 9.0, 9.1, 9.2, 9.3, 9.4, 9.5, 9.6, 9.7, 9.8, 9.9, or 10; from 6.7 to: 6.8, 6.9, 7.0, 7.1, 7.2, 7.3, 7.4, 7.5, 7.6, 7.7, 7.8, 7.9, 8.0, 8.1, 8.2, 8.3, 8.4, 8.5, 8.6, 8.7, 8.8, 8.9, 9.0, 9.1, 9.2, 9.3, 9.4, 9.5, 9.6, 9.7, 9.8, 9.9, or 10; from 6.8 to: 6.9, 7.0, 7.1, 7.2, 7.3, 7.4, 7.5, 7.6, 7.7, 7.8, 7.9, 8.0, 8.1, 8.2, 8.3, 8.4, 8.5, 8.6, 8.7, 8.8, 8.9, 9.0, 9.1, 9.2, 9.3, 9.4, 9.5, 9.6, 9.7, 9.8, 9.9, or 10; from 6.9 to: 7.0, 7.1, 7.2, 7.3, 7.4, 7.5, 7.6, 7.7, 7.8, 7.9, 8.0, 8.1, 8.2, 8.3, 8.4, 8.5, 8.6, 8.7, 8.8, 8.9, 9.0, 9.1, 9.2, 9.3, 9.4, 9.5, 9.6, 9.7, 9.8, 9.9, or 10; from 7.0 to: 7.1, 7.2, 7.3, 7.4, 7.5, 7.6, 7.7, 7.8, 7.9, 8.0, 8.1, 8.2, 8.3, 8.4, 8.5, 8.6, 8.7, 8.8, 8.9, 9.0, 9.1, 9.2, 9.3, 9.4, 9.5, 9.6, 9.7, 9.8, 9.9, or 10; from 7.1 to: 7.2, 7.3, 7.4, 7.5, 7.6, 7.7, 7.8, 7.9, 8.0, 8.1, 8.2, 8.3, 8.4, 8.5, 8.6, 8.7, 8.8, 8.9, 9.0, 9.1, 9.2, 9.3, 9.4, 9.5, 9.6, 9.7, 9.8, 9.9, or 10; from 7.2 to: 7.3, 7.4, 7.5, 7.6, 7.7, 7.8, 7.9, 8.0, 8.1, 8.2, 8.3, 8.4, 8.5, 8.6, 8.7, 8.8, 8.9, 9.0, 9.1, 9.2, 9.3, 9.4, 9.5, 9.6, 9.7, 9.8, 9.9, or 10; from 7.3 to: 7.4, 7.5, 7.6, 7.7, 7.8, 7.9, 8.0, 8.1, 8.2, 8.3, 8.4, 8.5, 8.6, 8.7, 8.8, 8.9, 9.0, 9.1, 9.2, 9.3, 9.4, 9.5, 9.6, 9.7, 9.8, 9.9, or 10; from 7.4 to: 7.5, 7.6, 7.7, 7.8, 7.9, 8.0, 8.1, 8.2, 8.3, 8.4, 8.5, 8.6, 8.7, 8.8, 8.9, 9.0, 9.1, 9.2, 9.3, 9.4, 9.5, 9.6, 9.7, 9.8, 9.9, or 10; from 7.5 to: 7.6, 7.7, 7.8, 7.9, 8.0, 8.1, 8.2, 8.3, 8.4, 8.5, 8.6, 8.7, 8.8, 8.9, 9.0, 9.1, 9.2, 9.3, 9.4, 9.5, 9.6, 9.7, 9.8, 9.9, or 10; from 7.6 to: 7.7, 7.8, 7.9, 8.0, 8.1, 8.2, 8.3, 8.4, 8.5, 8.6, 8.7, 8.8, 8.9, 9.0, 9.1, 9.2, 9.3, 9.4, 9.5, 9.6, 9.7, 9.8, 9.9, or 10; from 7.7 to: 7.8, 7.9, 8.0, 8.1, 8.2, 8.3, 8.4, 8.5, 8.6, 8.7, 8.8, 8.9, 9.0, 9.1, 9.2, 9.3, 9.4, 9.5, 9.6, 9.7, 9.8, 9.9, or 10; from 7.9 to: 8.0, 8.1, 8.2, 8.3, 8.4, 8.5, 8.6, 8.7, 8.8, 8.9, 9.0, 9.1, 9.2, 9.3, 9.4, 9.5, 9.6, 9.7, 9.8, 9.9, or 10; from 8.0 to: 8.1, 8.2, 8.3, 8.4, 8.5, 8.6, 8.7, 8.8, 8.9, 9.0, 9.1, 9.2, 9.3, 9.4, 9.5, 9.6, 9.7, 9.8, 9.9, or 10; from 8.1 to: 8.2, 8.3, 8.4, 8.5, 8.6, 8.7, 8.8, 8.9, 9.0, 9.1, 9.2, 9.3, 9.4, 9.5, 9.6, 9.7, 9.8, 9.9, or 10; from 8.2 to: 8.3, 8.4, 8.5, 8.6, 8.7, 8.8, 8.9, 9.0, 9.1, 9.2, 9.3, 9.4, 9.5, 9.6, 9.7, 9.8, 9.9, or 10; from 8.3 to: 8.4, 8.5, 8.6, 8.7, 8.8, 8.9, 9.0, 9.1, 9.2, 9.3, 9.4, 9.5, 9.6, 9.7, 9.8, 9.9, or 10; or from 8.4 to: 8.5, 8.6, 8.7, 8.8, 8.9, 9.0, 9.1, 9.2, 9.3, 9.4, 9.5, 9.6, 9.7, 9.8, 9.9, or 10. Taking the above-noted embodiments into account, it is contemplated and supported that any of the above-noted “pKa of at least” and “pKa of no more than” may be combined to provide an enclosed range (i.e. a pKa of from 5.0 to 7.6 or a pKa of from 5.5 to 7.0, etc.). Also contemplated and supported are combinations of the above-noted “pKa of at least” or “pKa of no more than” with the pKa of an LNP formulation provided in the Examples section of this document. Also contemplated and supported are combinations of the pKa of the Examples section of this document to provide a range (i.e. a LNP having a pKa of from [the pKa of LNP formulation X₁ in the Examples] to [the pKa of LNP formulation X₂ in the Examples] wherein X₁ and X₂ represent any two exemplary LNP formulations of the Examples. Such embodiments are distinguishable (and combinable) with embodiments wherein the first lipid or cation-ionizable lipid has a pKa by itself. In this regard, “the cation-ionizable lipid having a pKa” and “the LNP having a pKa” are distinguishable. The pKa of the LNP is influenced by the selection of cation-ionizable lipids and the mole percentages of the individual lipids in the overall formulation (i.e. the mole percentage of sterol, the mole percentage of a particular second lipid, the mole percentage of the particular first lipid) but to be clear the pKa of the LNP excludes the influence of the recombinant RNA molecules. That is, the term “pKa of the LNP” is defined to be measured from an LNP consisting of the lipids of the LNP formulation that comprises the lipids and the recombinant RNA molecules (i.e. a blank LNP wherein “blank” excludes recombinant RNA molecules and any other molecules that would be delivered by the LNP). The “pKa of the LNP” is measured by the following 6-(p-toluidino)-2-naphthalenesulfonic acid (TNS) assay. TNS was suspended at 300 μM in DMSO. Following Zhang et al. “Ionization behavior of amino lipids for siRNA delivery: determination of ionization constants, SAR, and the impact of lipid pKa on cationic lipid-biomembrane interactions, LANGMUIR 27: 1907-1914 (2001), the LNPs were admixed with the 300 μM TNS in DMSO and buffered solutions containing 20 mM boric acid, 10 mM imidazole, 10 mM sodium acetate, 10 mM glycylclycine, and 25 mM NaCl and an individual pH from 3 to 10, such that each final admixture had 75 μM of cation-ionizable lipids and 6 μM of TNS and the series of admixtures provided at least one admixture within each of one pH unit within the range of pH from 3 to 10 (i.e. an admixture with said buffer having a pH within 3 (i.e. from 3.0 to 3.99), an admixture with said buffer having a pH within 4 (i.e. from 4.0 to 4.99), an admixture with said buffer having a pH within 5 (i.e. from 5.0 to 5.99), an admixture with said buffer having a pH within 6 (i.e. from 6.0 to 6.99), an admixture with said buffer having a pH within 7 (i.e. from 7.0 to 7.99), an admixture with said buffer having a pH within 8 (i.e. from 8.0 to 8.99), and an admixture with said buffer having a pH within 9 (i.e. from 9.0 to 9.99)). The fluorescence of said mixtures are then determined with an excitation wavelength of 321 nm and an emission wavelength of 445 nm. The blank-subtracted fluorescence of each admixture is then determined by subtracting a blank solution's fluorescence from each admixture's emission fluorescence. The relative fluoresence is then determined by dividing the blank-subtracted fluorescence of each admixture from the relative fluorescence of the admixture that has the highest relative fluorescence. The relative fluorescences for all the admixtures versus the pHs of the respective buffers were then regressed following the Henderson-Hasselbalch equation to obtain a line of best fit. The pKa of the LNP was determined from the pH value that has a relative fluorescence of 0.5 on the line of best fit.

### First Lipids

[0231] In some embodiments, the LNP comprises lipids comprising: a first lipid (i.e. a cation-ionizable lipid), an optional sterol (e.g. cholesterol), an optional polymer-conjugated lipid, and an optional second lipid (i.e. an optional anionic lipid or an optional neutral lipid, including zwitterionic lipids). In some embodiments, the optional neutral lipid comprises a neutral lipid zwitterionic lipid. In some embodiments, the polymer-conjugated lipid comprises a polyethylene glycol-conjugated lipid. In some embodiments, the LNP comprises a lipid from WO2012/006376, WO2012/030901, WO2012/031046, WO2012/031043, WO2012/006378, WO2011/076807, WO2013/033563, WO2013/006825, WO2014/136086, WO2015/095340, WO2015/095346, WO2016/037053, WO2017/075531, WO2018/081480, WO2015/074085, WO2018/1703322, U.S. Patent Application Publication Nos.: 20220081392, 20220072155, 20220040285, 20210395188, 20210251898, 20210128488, 20210122703, 20210122702, 20210107861, 20200283372, 20200172472, 20200163878, 20200121809,20200046838,20190359556,20190314524,20190274968,20190270697, 20190022247, 20180185516, 20170283367,20170157268,20170119904,20160376224, 20160317676, or 20150376115, U.S. Application Nos. 61/905,724 or Ser. No. 15/614,499, or U.S. Pat. Nos. 8,802,863, 9,458,090, 9,593,077, 9,567,296, 9,604,908, 9,643,916, 9,669,097, 9,670,487, 9,737,619, 9,738,593, 9,725,720, 9,796,977,10,106,490, 10,166,298, 10,221,127, 10,723,692, 11,040,112, 11,168,051, or 11,285,222 (including ionizable and PEG-lipids, as referred to therein).

[0232] In some embodiments, the first lipid is a cation-ionizable lipid. In some embodiments, the cation-ionizable lipid has a pKa of at least: 5.0, 5.1, 5.2, 5.3, 5.4, 5.5, 5.6, 5.7, 5.8, 5.9, 6.0, 6.1, 6.2, 6.3, 6.4, 6.5, 6.6, 6.7, 6.8, 6.9, 7.0, 7.1, 7.2, 7.3, 7.4, 7.5, 7.6, 7.7, 7.8, 7.9, 8.0, 8.1, 8.2, 8.3, 8.4, 8.5, 8.6, 8.7, 8.8, 8.9, 9.0, 9.1, 9.2, 9.3, 9.4, 9.5, 9.6, 9.7, 9.8, 9.9, or 10. In embodiments, the cationic-ionizable lipid has a pKa of no more than: 10, 9.9, 9.8, 9.7, 9.6, 9.5, 9.4, 9.3, 9.2, 9.1, 9.0, 8.9, 8.8, 8.7, 8.6, 8.5, 8.4, 8.3, 8.2, 8.1, 8.0, 7.9, 7.8, 7.7, 7.6, 7.5, 7.4, 7.3, 7.2, 7.1, 7.0, 6.9, 6.8, 6.7, 6.6, 6.5, 6.4, 6.3, 6.2, 6.1, 6.0, 5.9, 5.8, 5.7, 5.6, 5.5, 5.4, 5.3, 5.2, 5.1, or 5.0. In some embodiments, the cation-ionizable lipid has a pKa from 5.0 to: 5.1, 5.2, 5.3, 5.4, 5.5, 5.6, 5.7, 5.8, 5.9, 6.0, 6.1, 6.2, 6.3, 6.4, 6.5, 6.6, 6.7, 6.8, 6.9, 7.0, 7.1, 7.2, 7.3, 7.4, 7.5, 7.6, 7.7, 7.8, 7.9, 8.0, 8.1, 8.2, 8.3, 8.4, 8.5, 8.6, 8.7, 8.8, 8.9, 9.0, 9.1, 9.2, 9.3, 9.4, 9.5, 9.6, 9.7, 9.8, 9.9, or 10; from 5.1 to: 5.2, 5.3, 5.4, 5.5, 5.6, 5.7, 5.8, 5.9, 6.0, 6.1, 6.2, 6.3, 6.4, 6.5, 6.6, 6.7, 6.8, 6.9, 7.0, 7.1, 7.2, 7.3, 7.4, 7.5, 7.6, 7.7, 7.8, 7.9, 8.0, 8.1, 8.2, 8.3, 8.4, 8.5, 8.6, 8.7, 8.8, 8.9, 9.0, 9.1, 9.2, 9.3, 9.4, 9.5, 9.6, 9.7, 9.8, 9.9, or 10; from 5.3 to: 5.4, 5.5, 5.6, 5.7, 5.8, 5.9, 6.0, 6.1, 6.2, 6.3, 6.4, 6.5, 6.6, 6.7, 6.8, 6.9, 7.0, 7.1, 7.2, 7.3, 7.4, 7.5, 7.6, 7.7, 7.8, 7.9, 8.0, 8.1, 8.2, 8.3, 8.4, 8.5, 8.6, 8.7, 8.8, 8.9, 9.0, 9.1, 9.2, 9.3, 9.4, 9.5, 9.6, 9.7, 9.8, 9.9, or 10; from 5.4 to: 5.5, 5.6, 5.7, 5.8, 5.9, 6.0, 6.1, 6.2, 6.3, 6.4, 6.5, 6.6, 6.7, 6.8, 6.9, 7.0, 7.1, 7.2, 7.3, 7.4, 7.5, 7.6, 7.7, 7.8, 7.9, 8.0, 8.1, 8.2, 8.3, 8.4, 8.5, 8.6, 8.7, 8.8, 8.9, 9.0, 9.1, 9.2, 9.3, 9.4, 9.5, 9.6, 9.7, 9.8, 9.9, or 10; from 5.5 to: 5.6, 5.7, 5.8, 5.9, 6.0, 6.1, 6.2, 6.3, 6.4, 6.5, 6.6, 6.7, 6.8, 6.9, 7.0, 7.1, 7.2, 7.3, 7.4, 7.5, 7.6, 7.7, 7.8, 7.9, 8.0, 8.1, 8.2, 8.3, 8.4, 8.5, 8.6, 8.7, 8.8, 8.9, 9.0, 9.1, 9.2, 9.3, 9.4, 9.5, 9.6, 9.7, 9.8, 9.9, or 10; from 5.6 to: 5.7, 5.8, 5.9, 6.0, 6.1, 6.2, 6.3, 6.4, 6.5, 6.6, 6.7, 6.8, 6.9, 7.0, 7.1, 7.2, 7.3, 7.4, 7.5, 7.6, 7.7, 7.8, 7.9, 8.0, 8.1, 8.2, 8.3, 8.4, 8.5, 8.6, 8.7, 8.8, 8.9, 9.0, 9.1, 9.2, 9.3, 9.4, 9.5, 9.6, 9.7, 9.8, 9.9, or 10; from 5.7 to: 5.8, 5.9, 6.0, 6.1, 6.2, 6.3, 6.4, 6.5, 6.6, 6.7, 6.8, 6.9, 7.0, 7.1, 7.2, 7.3, 7.4, 7.5, 7.6, 7.7, 7.8, 7.9, 8.0, 8.1, 8.2, 8.3, 8.4, 8.5, 8.6, 8.7, 8.8, 8.9, 9.0, 9.1, 9.2, 9.3, 9.4, 9.5, 9.6, 9.7, 9.8, 9.9, or 10; from: 5.8 to: 5.9, 6.0, 6.1, 6.2, 6.3, 6.4, 6.5, 6.6, 6.7, 6.8, 6.9, 7.0, 7.1, 7.2, 7.3, 7.4, 7.5, 7.6, 7.7, 7.8, 7.9, 8.0, 8.1, 8.2, 8.3, 8.4, 8.5, 8.6, 8.7, 8.8, 8.9, 9.0, 9.1, 9.2, 9.3, 9.4, 9.5, 9.6, 9.7, 9.8, 9.9, or 10; from 5.9 to: 6.0, 6.1, 6.2, 6.3, 6.4, 6.5, 6.6, 6.7, 6.8, 6.9, 7.0, 7.1, 7.2, 7.3, 7.4, 7.5, 7.6, 7.7, 7.8, 7.9, 8.0, 8.1, 8.2, 8.3, 8.4, 8.5, 8.6, 8.7, 8.8, 8.9, 9.0, 9.1, 9.2, 9.3, 9.4, 9.5, 9.6, 9.7, 9.8, 9.9, or 10; from 6.0 to: 6.1, 6.2, 6.3, 6.4, 6.5, 6.6, 6.7, 6.8, 6.9, 7.0, 7.1, 7.2, 7.3, 7.4, 7.5, 7.6, 7.7, 7.8, 7.9, 8.0, 8.1, 8.2, 8.3, 8.4, 8.5, 8.6, 8.7, 8.8, 8.9, 9.0, 9.1, 9.2, 9.3, 9.4, 9.5, 9.6, 9.7, 9.8, 9.9, or 10; from 6.1 to: 6.2, 6.3, 6.4, 6.5, 6.6, 6.7, 6.8, 6.9, 7.0, 7.1, 7.2, 7.3, 7.4, 7.5, 7.6, 7.7, 7.8, 7.9, 8.0, 8.1, 8.2, 8.3, 8.4, 8.5, 8.6, 8.7, 8.8, 8.9, 9.0, 9.1, 9.2, 9.3, 9.4, 9.5, 9.6, 9.7, 9.8, 9.9, or 10; from: 6.2 to: 6.3, 6.4, 6.5, 6.6, 6.7, 6.8, 6.9, 7.0, 7.1, 7.2, 7.3, 7.4, 7.5, 7.6, 7.7, 7.8, 7.9, 8.0, 8.1, 8.2, 8.3, 8.4, 8.5, 8.6, 8.7, 8.8, 8.9, 9.0, 9.1, 9.2, 9.3, 9.4, 9.5, 9.6, 9.7, 9.8, 9.9, or 10; from 6.3 to: 6.4, 6.5, 6.6, 6.7, 6.8, 6.9, 7.0, 7.1, 7.2, 7.3, 7.4, 7.5, 7.6, 7.7, 7.8, 7.9, 8.0, 8.1, 8.2, 8.3, 8.4, 8.5, 8.6, 8.7, 8.8, 8.9, 9.0, 9.1, 9.2, 9.3, 9.4, 9.5, 9.6, 9.7, 9.8, 9.9, or 10; from 6.4 to: 6.5, 6.6, 6.7, 6.8, 6.9, 7.0, 7.1, 7.2, 7.3, 7.4, 7.5, 7.6, 7.7, 7.8, 7.9, 8.0, 8.1, 8.2, 8.3, 8.4, 8.5, 8.6, 8.7, 8.8, 8.9, 9.0, 9.1, 9.2, 9.3, 9.4, 9.5, 9.6, 9.7, 9.8, 9.9, or 10; from 6.5 to: 6.6, 6.7, 6.8, 6.9, 7.0, 7.1, 7.2, 7.3, 7.4, 7.5, 7.6, 7.7, 7.8, 7.9, 8.0, 8.1, 8.2, 8.3, 8.4, 8.5, 8.6, 8.7, 8.8, 8.9, 9.0, 9.1, 9.2, 9.3, 9.4, 9.5, 9.6, 9.7, 9.8, 9.9, or 10; from 6.6 to: 6.7, 6.8, 6.9, 7.0, 7.1, 7.2, 7.3, 7.4, 7.5, 7.6, 7.7, 7.8, 7.9, 8.0, 8.1, 8.2, 8.3, 8.4, 8.5, 8.6, 8.7, 8.8, 8.9, 9.0, 9.1, 9.2, 9.3, 9.4, 9.5, 9.6, 9.7, 9.8, 9.9, or 10; from 6.7 to: 6.8, 6.9, 7.0, 7.1, 7.2, 7.3, 7.4, 7.5, 7.6, 7.7, 7.8, 7.9, 8.0, 8.1, 8.2, 8.3, 8.4, 8.5, 8.6, 8.7, 8.8, 8.9, 9.0, 9.1, 9.2, 9.3, 9.4, 9.5, 9.6, 9.7, 9.8, 9.9, or 10; from 6.8 to: 6.9, 7.0, 7.1, 7.2, 7.3, 7.4, 7.5, 7.6, 7.7, 7.8, 7.9, 8.0, 8.1, 8.2, 8.3, 8.4, 8.5, 8.6, 8.7, 8.8, 8.9, 9.0, 9.1, 9.2, 9.3, 9.4, 9.5, 9.6, 9.7, 9.8, 9.9, or 10; from 6.9 to: 7.0, 7.1, 7.2, 7.3, 7.4, 7.5, 7.6, 7.7, 7.8, 7.9, 8.0, 8.1, 8.2, 8.3, 8.4, 8.5, 8.6, 8.7, 8.8, 8.9, 9.0, 9.1, 9.2, 9.3, 9.4, 9.5, 9.6, 9.7, 9.8, 9.9, or 10; from 7.0 to: 7.1, 7.2, 7.3, 7.4, 7.5, 7.6, 7.7, 7.8, 7.9, 8.0, 8.1, 8.2, 8.3, 8.4, 8.5, 8.6, 8.7, 8.8, 8.9, 9.0, 9.1, 9.2, 9.3, 9.4, 9.5, 9.6, 9.7, 9.8, 9.9, or 10; from 7.1 to: 7.2, 7.3, 7.4, 7.5, 7.6, 7.7, 7.8, 7.9, 8.0, 8.1, 8.2, 8.3, 8.4, 8.5, 8.6, 8.7, 8.8, 8.9, 9.0, 9.1, 9.2, 9.3, 9.4, 9.5, 9.6, 9.7, 9.8, 9.9, or 10; from 7.2 to: 7.3, 7.4, 7.5, 7.6, 7.7, 7.8, 7.9, 8.0, 8.1, 8.2, 8.3, 8.4, 8.5, 8.6, 8.7, 8.8, 8.9, 9.0, 9.1, 9.2, 9.3, 9.4, 9.5, 9.6, 9.7, 9.8, 9.9, or 10; from 7.3 to: 7.4, 7.5, 7.6, 7.7, 7.8, 7.9, 8.0, 8.1, 8.2, 8.3, 8.4, 8.5, 8.6, 8.7, 8.8, 8.9, 9.0, 9.1, 9.2, 9.3, 9.4, 9.5, 9.6, 9.7, 9.8, 9.9, or 10; from 7.4 to: 7.5, 7.6, 7.7, 7.8, 7.9, 8.0, 8.1, 8.2, 8.3, 8.4, 8.5, 8.6, 8.7, 8.8, 8.9, 9.0, 9.1, 9.2, 9.3, 9.4, 9.5, 9.6, 9.7, 9.8, 9.9, or 10; from 7.5 to: 7.6, 7.7, 7.8, 7.9, 8.0, 8.1, 8.2, 8.3, 8.4, 8.5, 8.6, 8.7, 8.8, 8.9, 9.0, 9.1, 9.2, 9.3, 9.4, 9.5, 9.6, 9.7, 9.8, 9.9, or 10; from 7.6 to: 7.7, 7.8, 7.9, 8.0, 8.1, 8.2, 8.3, 8.4, 8.5, 8.6, 8.7, 8.8, 8.9, 9.0, 9.1, 9.2, 9.3, 9.4, 9.5, 9.6, 9.7, 9.8, 9.9, or 10; from 7.7 to: 7.8, 7.9, 8.0, 8.1, 8.2, 8.3, 8.4, 8.5, 8.6, 8.7, 8.8, 8.9, 9.0, 9.1, 9.2, 9.3, 9.4, 9.5, 9.6, 9.7, 9.8, 9.9, or 10; from 7.9 to: 8.0, 8.1, 8.2, 8.3, 8.4, 8.5, 8.6, 8.7, 8.8, 8.9, 9.0, 9.1, 9.2, 9.3, 9.4, 9.5, 9.6, 9.7, 9.8, 9.9, or 10; from 8.0 to: 8.1, 8.2, 8.3, 8.4, 8.5, 8.6, 8.7, 8.8, 8.9, 9.0, 9.1, 9.2, 9.3, 9.4, 9.5, 9.6, 9.7, 9.8, 9.9, or 10; from 8.1 to: 8.2, 8.3, 8.4, 8.5, 8.6, 8.7, 8.8, 8.9, 9.0, 9.1, 9.2, 9.3, 9.4, 9.5, 9.6, 9.7, 9.8, 9.9, or 10; from 8.2 to: 8.3, 8.4, 8.5, 8.6, 8.7, 8.8, 8.9, 9.0, 9.1, 9.2, 9.3, 9.4, 9.5, 9.6, 9.7, 9.8, 9.9, or 10; from 8.3 to: 8.4, 8.5, 8.6, 8.7, 8.8, 8.9, 9.0, 9.1, 9.2, 9.3, 9.4, 9.5, 9.6, 9.7, 9.8, 9.9, or 10; or from 8.4 to: 8.5, 8.6, 8.7, 8.8, 8.9, 9.0, 9.1, 9.2, 9.3, 9.4, 9.5, 9.6, 9.7, 9.8, 9.9, or 10. Taking the above-noted embodiments into account, it is contemplated and supported that any of the above-noted “pKa of at least” and “pKa of no more than” may be combined to provide an enclosed range (i.e. a pKa of from 5.0 to 7.6 or a pKa of from 5.5 to 7.0, etc.). Also contemplated and supported are combinations of the above-noted “pKa of at least” or “pKa of no more than” with the pKa of a lipid provided in the Examples section of this document. Also contemplated and supported are combinations of the pKa of the lipids section of this document to provide a range (i.e. a cation-ionizable lipid having a pKa of from [the pKa of lipid X₁ in the Examples] to [the pKa of lipid X₂ in the Examples] wherein X₁ and X₂ represent any two exemplary lipids of the Examples. Such embodiments are distinguishable (and combinable) with embodiments wherein the LNP has a pKa as a whole (sometimes called “apparent pKa”). In this regard, “the cation-ionizable lipid having a pKa” and “the LNP having a pKa” are distinguishable. Within the meaning of “the cation-ionizable lipid having a pKa,” the pKa and the values of the cation-ionizable lipid is determined by (or the value is determined to fall within a pKa range of from value X to value Y, and thereby the values of X and Y are determined by):
[0233] 1) admixing 400 μL of 2 mM of the first lipid that are in 100 volume % ethanol and 800 μL of 0.3 mM of fluorescent probe toluene nitrosulphonic acid (TNS), which is in 90 volume % ethanol and 10 volume % methanol, thereby obtaining a lipid/TNS mixture;
[0234] 2) admixing 7.5 μL of the lipid/TNS mixture and 242.5 μL of a first buffer comprising a sodium salt buffer comprising 20 mM sodium phosphate, 25 mM sodium citrate, 20 mM sodium acetate, and 150 mM sodium chloride, wherein the first buffer has a first pH from 4.44 to 4.52, thereby obtaining a first mixture, and dispensing 100 μL of the first mixture in a first well of a 96-well plate, which has a clear bottom;
[0235] 3) admixing 7.5 μL of the lipid/TNS mixture and 242.5 μL of a second buffer comprising the sodium salt buffer, wherein the second buffer has a second pH of 5.27, thereby obtaining a second mixture, and dispensing 100 μL of the second mixture in a second well of the 96-well plate;
[0236] 4) admixing 7.5 μL of the lipid/TNS mixture and 242.5 μL of a third buffer comprising the sodium salt buffer, wherein the third buffer has a third pH of from 6.15 to 6.21, thereby obtaining a third mixture, and dispensing 100 μL of the third mixture in a third well of the 96-well plate;
[0237] 5) admixing 7.5 μL of the lipid/TNS mixture and 242.5 μL of a fourth buffer comprising the sodium salt buffer, wherein the fourth buffer has a fourth pH of 6.57, thereby obtaining a fourth mixture, and dispensing 100 μL of the fourth mixture in a fourth well of the 96-well plate;
[0238] 6) admixing 7.5 μL of the lipid/TNS mixture and 242.5 μL of a fifth buffer comprising the sodium salt buffer, wherein the fifth buffer has a fifth pH of from 7.10 to 7.20, thereby obtaining a fifth mixture, and dispensing 100 μL of the fifth mixture in a fifth well of the 96-well plate;
[0239] 7) admixing 7.5 μL of the lipid/TNS mixture and 242.5 μL of a sixth comprising the sodium salt buffer, wherein the sixth buffer has a sixth pH of from 7.72 to 7.80, thereby obtaining a sixth mixture, and dispensing 100 μL of the sixth mixture in a sixth well of the 96-well plate;
[0240] 8) admixing 7.5 μL of the lipid/TNS mixture and 242.5 μL of a seventh buffer comprising the sodium salt buffer, wherein the seventh buffer has a seventh pH of from 8.27 to 8.33, thereby obtaining a seventh mixture, and dispensing 100 μL of the seventh mixture in a seventh well of the 96-well plate;
[0241] 9) admixing 7.5 μL of the lipid/TNS mixture and 242.5 μL of an eighth buffer comprising the sodium salt buffer, wherein the eighth buffer has a eighth pH of from 10.47 to 11.12, thereby obtaining an eighth mixture, and dispensing 100 μL of the eighth mixture in an eighth well of the 96-well plate;
[0242] 10) measuring the absolute fluorescence at a wavelength of 431 nm with an excitation wavelength of 322 nm and a cut-off below 420 nm of each of the first through eighth wells and an empty well of the 96-well plate;
[0243] 11) subtracting the absolute fluorescence of the empty well from each of the absolute fluorescences of the first through the eighth wells, thereby obtaining a blank-subtracted fluorescence for each of the first through eighth mixtures;
[0244] 12) normalizing each of the blank-subtracted fluorescences of the first through eighth mixtures to the blank-subtracted fluorescence of the first mixture, thereby obtaining a relative fluorescence for each of the first through eighth mixtures, the relative fluorescence of the first mixture being 1;
[0245] 13) regressing by the Henderson-Hasselbalch equation, the first through eighth pHs versus the respective relative fluorescences of the first through eighth mixtures thereby obtaining a line of best fit; and
[0246] 14) determining the pKa as the pH at which a relative fluorescence of 0.5 is obtained on the line of best fit. (i.e. A line of best fit is a sigmoidal curve with four parameters.)

[0247] In some embodiments, the cation-ionizable lipid comprises an amine that can be a tertiary amine and become charged depending upon the pH of the solution that the cation-ionizable lipid is in when compared to the pKa of the cation-ionizable lipid. In some embodiments, at least half of the cation-ionizable lipids are neutrally charged and the amine is a tertiary amine when the pH of the solvent that the cation-ionizable lipids are in is above the pKa; and at least half of the cation-ionizable lipids are positively charged when the pH of the solvent that the cation-ionizable lipids are in is below the pKa. In this regard, in some embodiments, but without being limited to a particular theory, it is considered that the positive charge of the ionizable lipid is distributed on the (tertiary) amine. Since the amine can vary in charge depending upon the pH of the solution relative to the pKa of the cation-ionizable lipid and since, without being bound a particular theory, the amine can be neutrally or positively charged when tertiary, in some embodiments, the amine is an ionizable amine.

[0248] The cation-ionizable lipid will be further described when the amine is tertiary and when the cation-ionizable lipid is neutrally charged. That is, the lipid being in a tertiary amine state and having a neutral charged is hereby described, without having to describe the cation-ionizable lipid when the lipid becomes charged. In some embodiments, the cation-ionizable lipid further comprises, in addition to the above-noted ionizable amine, a headgroup (RH) and a fatty acid tail (R^{FA1} or R^{FA2}). In some embodiments, the cation-ionizable lipid further comprises (in addition to the above-noted ionizable amine) a headgroup and at least two fatty acid tails (R^{FA1} and R^{FA2}), such as in Formula I.

[chemical structure]

[0249] In some embodiments, the amine provides a branchpoint between the headgroup and a fatty acid tail. In some embodiments, the fatty acid tail (R^{FA}) or the at least two fatty acid tails (i.e. R^{FA1}R^{FA2} . . . ) are immediately off of the ionizable amine. In some embodiments, the fatty acid tail comprises, or the at least two fatty acid tails comprise, a biodegradeable group (i.e. R^{BD1} or R^{BD2}), and the at least two fatty acid tails are the same or independent of one another. In some embodiments, the at least two fatty acid tails each comprise a biodegradeable group, such as in Formula II, and the biodegradeable groups are the same or independent of one another. In some embodiments, the biodegradeable group comprises, in order from the ionizable amine, —O(C=O)—, —(C=O)O—, —C(═O)—, —O—, —S(O)x-, —S—S—, —C(═O)S—, SC(═O)—, —NR^{a}C(═O)—, —C(═O)NR^{a}—, NR^{a}C(═O)NR^{a}—, —OC(═O)NR^{a}—, or —NR^{a}C(═O)O—, wherein X is 0, 1, or 2, and wherein R^{a} is a hydrogen or a C₁-C₁₂ alkyl. In some embodiments, the fatty acid comprises, or the at least two fatty acids comprise, a C₁-C₁₂ alkyl, a C₁-C₁₂ alkylene, or a C₁-C₁₂ alkenylene (i.e. R^{FC1} and R^{FC2}) between the amine branchpoint and the biodegradeable group), such as in Formula II. In some embodiments, the fatty acid comprises, or the two or more fatty acids comprise, distal to the ionizable amine and the biodegradeable group, a C₅-C₂₄ alkyl, a C₅-C₂₄ alkylene, a C₇-C₂₃ alkyl, a C₇-C₂₃ alkylene, a C₈-C₂₂ alkyl, a C₈-C₂₂ alkylene, a C₉-C₂₁ alkyl, a C₉-C₂₁ alkylene, a C₁₀-C₂₀ alkyl, a C₁₀-C₂₀ alkylene, a C₁₁-C₁₉ alkyl, a C₁₁-C₁₉ alkylene, a C₁₂-C₁₈ alkyl, a C₁₂-C₁₈ alkylene, a C₁₃-C₁₇ alkyl, or a C₁₃-C₁₇ alkylene (i.e. R^{FC3} and R^{FC4}), such as in Formula II.

[chemical structure]

[0250] Wherein: R^{FC1} and R^{FC2} are each independently a C₁-C₁₂ alkyl, a C₁-C₁₂ alkylene, or a C₁-C₁₂ alkenylene;
[0251] R^{FC3} and R^{FC4} are each independently: a C₆-C₂₄ alkyl, a C₆-C₂₄ alkylene, a C₇-C₂₃ alkyl, a C₇-C₂₃ alkylene, a C₈-C₂₂ alkyl, a C₈-C₂₂ alkylene, a C₉-C₂₁ alkyl, a C₉-C₂₁ alkylene, a C₁₀-C₂₀ alkyl, a C₁₀-C₂₀ alkylene, a C₁₁-C₁₉ alkyl, a C₁₁-C₁₉ alkylene, a C₁₂-C₁₈ alkyl, a C₁₂-C₁₈ alkylene, a C₁₃-C₁₇ alkyl, a C₁₃-C₁₇ alkylene;
[0252] R^{BD1} and R^{BD2} are each independently: —O(C=O)—, —(C=O)O—, —C(═O)—, —O—, —S(O)x-, —S—S—, —C(═O)S—, SC(═O)—, —NR^{a}C(═O)—, —C(═O)NR^{a}—, NR^{a}C(═O)NR^{a}—, —OC(═O)NR^{a}—, or —NR^{a}C(═O)O—; wherein X is 0, 1, or 2, and wherein R^{a} is a hydrogen or a C₁-C₁₂ alkyl.

[0253] In some embodiments, the C₆-C₂₄ alkyl or the C₆-C₂₄ alkylene is connected to the biodegradeable group at C₆-C₁₂, C₇-C₁₁, C₅-C₁₀, or C₉ thereof. In some embodiments, the C₆-C₂₄ alkyl or the C₆-C₂₄ alkylene of each of the at least two fatty acid tails independently comprises:

[chemical structure]

[0254] In some embodiments, the headgroup comprises, consists of, is, or has a first group (i.e. R^{H1}) and a second group (i.e. R^{H2}), wherein the first group is a C₁-C₂₄ alkyl, C₁-C₂₄ alkylene, a C₁-C₂₄ alkenylene, a C₃-C₈ cycloalkylene, or a C₃-C₈ cycloalkenylene, and the second group is H, —OH, CN, —C(═O)OR⁴, —OC(═O)OR⁴, —NR⁵C(═O)OR⁴, or OR⁵; wherein R⁴ is C₁-C₁₂ alkyl and R⁵ is H or C₁-C₆ alkyl. In some embodiments, the headgroup comprises a linear or branched form of: —(CH₂)₆OH, —(CH₂)₅OH, —(CH₂)OH, —(CH₂)₃OH, —(CH₂)₂OH, or —CH₂OH. In some embodiments, the cation-ionizable lipid comprises, consists of, or is 9-Heptadecanyl 8-{(2-hydroxyethyl)[6-oxo-6-(undecyloxy)hexyl]amino}octanoate.

[0255] In some embodiments, the cation-ionizable lipid is:

[chemical structure]

[chemical structure]

[0256] In an embodiment, the cation-ionizable lipid comprises, consists of, consists essentially of, or is RV28 having the following structure:

[chemical structure]

[0257] In an embodiment, the cation-ionizable lipid comprises, consists of, consists essentially of, or is RV31 having the following structure:

[chemical structure]

[0258] In an embodiment, the cation-ionizable lipid comprises, consists of, consists essentially of, or is RV33 having the following structure:

[chemical structure]

[0259] In an embodiment, the cation-ionizable lipid comprises, consists of, consists essentially of, or is RV37 having the following structure:

[chemical structure]

[0260] In an embodiment, the cation-ionizable lipid comprises, consists of, consists essentially of, or is RV39, i.e., 2,5-bis((9Z,12Z)-octadeca-9,12-dien-1-yloxy)benzyl 4-(dimethylamino)butanoate):

[chemical structure]

[0261] In an embodiment, the cation-ionizable lipid comprises, consists of, consists essentially of, or is RV42 having the following structure:

[chemical structure]

[0262] In an embodiment, the cation-ionizable lipid comprises, consists of, consists essentially of, or is RV44 having the following structure:

[chemical structure]

[0263] In an embodiment, the cation-ionizable lipid comprises, consists of, consists essentially of, or is RV73 having the following structure:

[chemical structure]

[0264] In an embodiment, the cation-ionizable lipid comprises, consists of, consists essentially of, or is RV75 having the following structure:

[chemical structure]

[0265] In an embodiment, the cation-ionizable lipid comprises, consists of, consists essentially of, or is RV81 having the following structure:

[chemical structure]

[0266] In an embodiment, the cation-ionizable lipid comprises, consists of, consists essentially of, or is RV84 having the following structure:

[chemical structure]

[0267] In an embodiment, the cation-ionizable lipid comprises, consists of, consists essentially of, or is RV85 having the following structure:

[chemical structure]

[0268] In an embodiment, the cation-ionizable lipid comprises, consists of, consists essentially of, or is RV86 having the following structure:

[chemical structure]

[0269] In an embodiment, the cation-ionizable lipid comprises, consists of, consists essentially of, or is RV88 having the following structure:

[chemical structure]

[0270] In an embodiment, the cation-ionizable lipid comprises, consists of, consists essentially of, or is RV91 having the following structure:

[chemical structure]

[0271] In an embodiment, the cation-ionizable lipid comprises, consists of, consists essentially of, or is RV92 having the following structure:

[chemical structure]

[0272] In an embodiment, the cation-ionizable lipid comprises, consists of, consists essentially of, or is RV93 having the following structure:

[chemical structure]

[0273] In an embodiment, the cation-ionizable lipid comprises, consists of, consists essentially of, or is 2-(5-((4-((1,4-dimethylpiperidine-4-carbonyl)oxy)hexadecyl)oxy)-5-oxopentyl)propane-1,3-diyl dioctanoate (RV94), having the following structure:

[chemical structure]

[0274] In an embodiment, the cation-ionizable lipid comprises, consists of, consists essentially of, or is RV95 having the following structure:

[chemical structure]

[0275] In an embodiment, the cation-ionizable lipid comprises, consists of, consists essentially of, or is RV96 having the following structure:

[chemical structure]

[0276] In an embodiment, the cation-ionizable lipid comprises, consists of, consists essentially of, or is RV97 having the following structure:

[chemical structure]

[0277] In an embodiment, the cation-ionizable lipid comprises, consists of, consists essentially of, or is RV99 having the following structure:

[chemical structure]

[0278] In an embodiment, the cation-ionizable lipid comprises, consists of, consists essentially of, or is RV101 having the following structure:

[chemical structure]

[0279] In some embodiments, the cation-ionizable lipid comprise, consist of, consist essentially of, or are a lipid having the structure of Formula III:

[chemical structure]

[0280] wherein n=an integer from 1 to 3 and
[0281] (i) R₁ is CH₃, R₂ and R₃ are both H, and Y is C; or
[0282] (ii) R₁and R₂ are collectively CH₂—CH₂ and together with the nitrogen form a five-, six-, or seven-membered heterocycloalkyl, R₃ is CH₃, and Y is C; or
[0283] (iii) R₁ is CH₃, R₂ and R₃ are both absent, and Y is O;
[0284] wherein o is 0 or 1;
[0285] wherein X is:
[0286] (i)

[chemical structure]

wherein R₄ and R₅ are independently a C₁₀₋₂₀ hydrocarbon chain having one or two cis alkene groups at either or both of the omega 6 and 9 positions; or
[0287] (ii) —CH(—R₆)—R₇, wherein
[0288] (1) R₆ is —(CH₂)p-O—C(O)—R₈ or —Cₚ—R₈;
[0289] (2) R₇ is —(CH₂)_{p′}—O—C(O)—R₈′ or —C_{p′}—R₈′,
[0290] (3) p and p′ are independently 0, 1, 2, 3 or 4; and
[0291] (4) R₈ and R_{8′} are independently a
[0292] (A) —C₈₋₂₀ hydrocarbon chain having one or two cis alkene groups at either or both of the omega 6 and 9 positions;
[0293] (B) —C₁₋₃—C(—O—C₆₋₁₂)—O—C₆₋₁₂ saturated or unsaturated hydrocarbon chain;
[0294] (C) —C₆₋₁₆ saturated hydrocarbon chain;
[0295] (D) —C(—C₆₋₁₆)—C₆₋₁₆ saturated or unsaturated hydrocarbon chain;
[0296] (E) —C[—C—O—C(O)—C₄₋₁₂]—C—O—C(O)—C₄₋₁₂ saturated or unsaturated hydrocarbon chain; and
[0297] (F) —C₆₋₁₆ saturated or unsaturated hydrocarbon chain.

[0298] In an embodiment, R₁ is CH₃, R₂ and R₃ are both H, and Y is C. In some embodiments, R₁ and R₂ are collectively CH₂—CH₂ and together with the nitrogen form a five-, six-, or seven-membered heterocycloalkyl, R₃ is CH₃, and Y is C. In some embodiments, R₁ is CH₃, R₂ and R₃ are both absent, and Y is O.

[0299] In an embodiment, X is

[chemical structure]

wherein R₄ and R₅ are independently a C₁₀₋₂₀ hydrocarbon chain having one or two cis alkene groups at either or both of the omega 6 and 9 positions.

[0300] In an embodiment, X is —CH(—R₆)—R₇, R₆ is —(CH₂)ₚ—O—C(O)—R₈, R₇ is —(CH₂)_{p′}—O—C(O)—R₈′, p and p′ are independently 0, 1, 2, 3 or 4; R₈ is a —C₈₋₂₀ hydrocarbon chain having one or two cis alkene groups at either or both of the omega 6 and 9 positions; and R₈′ is a —C₈₋₂₀ hydrocarbon chain having one or two cis alkene groups at either or both of the omega 6 and 9 positions.

[0301] In an embodiment, X is —CH(—R₆)—R₇, R₆ is —(CH₂)ₚ—O—C(O)—R₈, R₇ is —(CH₂)_{p′}—O—C(O)—R₈′, p and p′ are independently 0, 1, 2, 3 or 4; R₈ is a —C₈₋₂₀ hydrocarbon chain having one or two cis alkene groups at either or both of the omega 6 and 9 positions; and R₈′ is a —C₁₋₃—C(—O—C₆₋₁₂)—O—C₆₋₁₂ saturated or unsaturated hydrocarbon chain.

[0302] In an embodiment, X is —CH(—R₆)—R₇, R₆ is —(CH₂)ₚ—O—C(O)—R₈, R₇ is —(CH₂)_{p′}—O—C(O)—R₈′, p and p′ are independently 0, 1, 2, 3 or 4; R₈ is a —C₈₋₂₀ hydrocarbon chain having one or two cis alkene groups at either or both of the omega 6 and 9 positions; and R₈′ is a —C₆₋₁₆ saturated hydrocarbon chain.

[0303] In an embodiment, X is —CH(—R₆)—R₇, R₆ is —(CH₂)ₚ—O—C(O)—R₈, R₇ is —(CH₂)_{p′}—O—C(O)—R₈′, p and p′ are independently 0, 1, 2, 3 or 4; R₈ is a —C₈₋₂₀ hydrocarbon chain having one or two cis alkene groups at either or both of the omega 6 and 9 positions; and R₈′ is a —C(—C₆₋₁₆)—C₆₋₁₆ saturated or unsaturated hydrocarbon chain.

[0304] In an embodiment, X is —CH(—R₆)—R₇, R₆ is —(CH₂)ₚ—O—C(O)—R₈, R₇ is —(CH₂)_{p′}—O—C(O)—R₈′, p and p′ are independently 0, 1, 2, 3 or 4; R₈ is a —C₈₋₂₀ hydrocarbon chain having one or two cis alkene groups at either or both of the omega 6 and 9 positions; and R₈′ is a —C[—C—O—C(O)—C₄₋₁₂]—C—O—C(O)—C₄₋₁₂ saturated or unsaturated hydrocarbon chain.

[0305] In an embodiment, X is —CH(—R₆)—R₇, R₆ is —(CH₂)ₚ—O—C(O)—R₈, R₇ is —(CH₂)_{p′}—O—C(O)—R₈′, p and p′ are independently 0, 1, 2, 3 or 4; R₈ is a —C₈₋₂₀ hydrocarbon chain having one or two cis alkene groups at either or both of the omega 6 and 9 positions; and R₈′ is a —C₆₋₁₆ saturated or unsaturated hydrocarbon chain.

[0306] In an embodiment, X is —CH(—R₆)—R₇, R₆ is —(CH₂)ₚ—O—C(O)—R₈, R₇ is —(CH₂)_{p′}—O—C(O)—R₈′, p and p′ are independently 0, 1, 2, 3 or 4; R₈ is a-C₁₋₃—C(—O—C₆₋₁₂)—O—C₆₋₁₂ saturated or unsaturated hydrocarbon chain; and R₈′ is a —C₈₋₂₀ hydrocarbon chain having one or two cis alkene groups at either or both of the omega 6 and 9 positions.

[0307] In an embodiment, X is —CH(—R₆)—R₇, R₆ is —(CH₂)ₚ—O—C(O)—R₈, R₇ is —(CH₂)_{p′}—O—C(O)—R₈′, p and p′ are independently 0, 1, 2, 3 or 4; R₈ is —C₁₋₃—C(—O—C₆₋₁₂)—O—C₆₋₁₂ saturated or unsaturated hydrocarbon chain; and R₈′ is a —C₁₋₃—C(—O—C₆₋₁₂)—O—C₆₋₁₂ saturated or unsaturated hydrocarbon chain.

[0308] In an embodiment, X is —CH(—R₆)—R₇, R₆ is —(CH₂)ₚ—O—C(O)—R₈, R₇ is —(CH₂)_{p′}—O—C(O)—R₈′, p and p′ are independently 0, 1, 2, 3 or 4; R₈ is a-C₁₋₃—C(—O—C₆₋₁₂)—O—C₆₋₁₂ saturated or unsaturated hydrocarbon chain; and R₈′ is a —C₆₋₁₆ saturated hydrocarbon chain.

[0309] In an embodiment, X is —CH(—R₆)—R₇, R₆ is —(CH₂)ₚ—O—C(O)—R₈, R₇ is —(CH₂)_{p′}—O—C(O)—R₈′, p and p′ are independently 0, 1, 2, 3 or 4; R₈ is a-C₁₋₃—C(—O—C₆₋₁₂)—O—C₆₋₁₂ saturated or unsaturated hydrocarbon chain; and R₈′ is a —C(—C₆₋₁₆)—C₆₋₁₆ saturated or unsaturated hydrocarbon chain.

[0310] In an embodiment, X is —CH(—R₆)—R₇, R₆ is —(CH₂)ₚ—O—C(O)—R₈, R₇ is —(CH₂)_{p′}—O—C(O)—R₈′, p and p′ are independently 0, 1, 2, 3 or 4; R₈ is a-C₁₋₃—C(—O—C₆₋₁₂)—O—C₆₋₁₂ saturated or unsaturated hydrocarbon chain; and R₈′ is a —C[—C—O—C(O)—C₄₋₁₂]—C—O—C(O)—C₄₋₁₂ saturated or unsaturated hydrocarbon chain.

[0311] In an embodiment, X is —CH(—R₆)—R₇, R₆ is —(CH₂)ₚ—O—C(O)—R₈, R₇ is —(CH₂)_{p′}—O—C(O)—R₈′, p and p′ are independently 0, 1, 2, 3 or 4; R₈ is a-C₁₋₃—C(—O—C₆₋₁₂)—O—C₆₋₁₂ saturated or unsaturated hydrocarbon chain; and R₈′ is a —C₆₋₁₆ saturated or unsaturated hydrocarbon chain.

[0312] In an embodiment, X is —CH(—R₆)—R₇, R₆ is —(CH₂)ₚ—O—C(O)—R₈, R₇ is —(CH₂)_{p′}—O—C(O)—R₈′, p and p′ are independently 0, 1, 2, 3 or 4; R₈ is a —C₆₋₁₆ saturated hydrocarbon chain; and R₈′ is a —C₈₋₂₀ hydrocarbon chain having one or two cis alkene groups at either or both of the omega 6 and 9 positions.

[0313] In an embodiment, X is —CH(—R₆)—R₇, R₆ is —(CH₂)ₚ—O—C(O)—R₈, R₇ is —(CH₂)_{p′}—O—C(O)—R₈′, p and p′ are independently 0, 1, 2, 3 or 4; R₈ is a —C₆₋₁₆ saturated hydrocarbon chain; and R₈′ is a —C₁₋₃—C(—O—C₆₋₁₂)—O—C₆₋₁₂ saturated or unsaturated hydrocarbon chain.

[0314] In an embodiment, X is —CH(—R₆)—R₇, R₆ is —(CH₂)ₚ—O—C(O)—R₈, R₇ is —(CH₂)_{p′}—O—C(O)—R₈′, p and p′ are independently 0, 1, 2, 3 or 4; R₈ is a —C₆₋₁₆ saturated hydrocarbon chain; and R₈′ is a —C₆₋₁₆ saturated hydrocarbon chain.

[0315] In an embodiment, X is —CH(—R₆)—R₇, R₆ is —(CH₂)ₚ—O—C(O)—R₈, R₇ is —(CH₂)_{p′}—O—C(O)—R₈′, p and p′ are independently 0, 1, 2, 3 or 4; R₈ is a —C₆₋₁₆ saturated hydrocarbon chain; and R₈′ is a —C(—C₆₋₁₆)—C₆₋₁₆ saturated or unsaturated hydrocarbon chain.

[0316] In an embodiment, X is —CH(—R₆)—R₇, R₆ is —(CH₂)ₚ—O—C(O)—R₈, R₇ is —(CH₂)_{p′}—O—C(O)—R₈′, p and p′ are independently 0, 1, 2, 3 or 4; R₈ is a —C₆₋₁₆ saturated hydrocarbon chain; and R₈′ is a —C[—C—O—C(O)—C₄₋₁₂]—C—O—C(O)—C₄₋₁₂ saturated or unsaturated hydrocarbon chain.

[0317] In an embodiment, X is —CH(—R₆)—R₇, R₆ is —(CH₂)ₚ—O—C(O)—R₈, R₇ is —(CH₂)_{p′}—O—C(O)—R₈′, p and p′ are independently 0, 1, 2, 3 or 4; R₈ is a —C₆₋₁₆ saturated hydrocarbon chain; and R₈′ is a —C₆₋₁₆ saturated or unsaturated hydrocarbon chain.

[0318] In an embodiment, X is —CH(—R₆)—R₇, R₆ is —(CH₂)ₚ—O—C(O)—R₈, R₇ is —(CH₂)_{p′}—O—C(O)—R₈′, p and p′ are independently 0, 1, 2, 3 or 4; and R₈ is a —C(—C₆₋₁₆)—C₆₋₁₆ saturated or unsaturated hydrocarbon chain; and R₈′ is a —C₈₋₂₀ hydrocarbon chain having one or two cis alkene groups at either or both of the omega 6 and 9 positions.

[0319] In an embodiment, X is —CH(—R₆)—R₇, R₆ is —(CH₂)ₚ—O—C(O)—R₈, R₇ is —(CH₂)_{p′}—O—C(O)—R₈′, p and p′ are independently 0, 1, 2, 3 or 4; and R₈ is a —C(—C₆₋₁₆)—C₆₋₁₆ saturated or unsaturated hydrocarbon chain; and R₈′ is a —C₁₋₃—C(—O—C₆₋₁₂)—O—C₆₋₁₂ saturated or unsaturated hydrocarbon chain.

[0320] In an embodiment, X is —CH(—R₆)—R₇, R₆ is —(CH₂)ₚ—O—C(O)—R₈, R₇ is —(CH₂)_{p′}—O—C(O)—R₈′, p and p′ are independently 0, 1, 2, 3 or 4; and R₈ is a —C(—C₆₋₁₆)—C₆₋₁₆ saturated or unsaturated hydrocarbon chain; and R₈′ is a —C₆₋₁₆ saturated hydrocarbon chain.

[0321] In an embodiment, X is —CH(—R₆)—R₇, R₆ is —(CH₂)ₚ—O—C(O)—R₈, R₇ is —(CH₂)_{p′}—O—C(O)—R₈′, p and p′ are independently 0, 1, 2, 3 or 4; and R₈ is a —C(—C₆₋₁₆)—C₆₋₁₆ saturated or unsaturated hydrocarbon chain; and R₈′ is a —C(—C₆₋₁₆)—C₆₋₁₆ saturated or unsaturated hydrocarbon chain.

[0322] In an embodiment, X is —CH(—R₆)—R₇, R₆ is —(CH₂)ₚ—O—C(O)—R₈, R₇ is —(CH₂)_{p′}—O—C(O)—R₈′, p and p′ are independently 0, 1, 2, 3 or 4; and R₈ is a —C(—C₆₋₁₆)—C₆₋₁₆ saturated or unsaturated hydrocarbon chain; and R₈′ is a —C[—C—O—C(O)—C₄₋₁₂]—C—O—C(O)—C₄₋₁₂ saturated or unsaturated hydrocarbon chain.

[0323] In an embodiment, X is —CH(—R₆)—R₇, R₆ is —(CH₂)ₚ—O—C(O)—R₈, R₇ is —(CH₂)_{p′}—O—C(O)—R₈′, p and p′ are independently 0, 1, 2, 3 or 4; and R₈ is a —C(—C₆₋₁₆)—C₆₋₁₆ saturated or unsaturated hydrocarbon chain; and R₈′ is a —C₆₋₁₆ saturated or unsaturated hydrocarbon chain.

[0324] In an embodiment, X is —CH(—R₆)—R₇, R₆ is —(CH₂)ₚ—O—C(O)—R₈, R₇ is —(CH₂)_{p′}—O—C(O)—R₈′, p and p′ are independently 0, 1, 2, 3 or 4; and R₈ is a —C[—C—O—C(O)—C₄₋₁₂]—C—O—C(O)—C₄₋₁₂ saturated or unsaturated hydrocarbon chain; and R₈′ is a —C₈₋₂₀ hydrocarbon chain having one or two cis alkene groups at either or both of the omega 6 and 9 positions.

[0325] In an embodiment, X is —CH(—R₆)—R₇, R₆ is —(CH₂)ₚ—O—C(O)—R₈, R₇ is —(CH₂)_{p′}—O—C(O)—R₈′, p and p′ are independently 0, 1, 2, 3 or 4; and R₈ is a —C[—C—O—C(O)—C₄₋₁₂]—C—O—C(O)—C₄₋₁₂ saturated or unsaturated hydrocarbon chain; and R₈′ is a —C₁₋₃—C(—O—C₆₋₁₂)—O—C₆₋₁₂ saturated or unsaturated hydrocarbon chain.

[0326] In an embodiment, X is —CH(—R₆)—R₇, R₆ is —(CH₂)ₚ—O—C(O)—R₈, R₇ is —(CH₂)_{p′}—O—C(O)—R₈′, p and p′ are independently 0, 1, 2, 3 or 4; and R₈ is a —C[—C—O—C(O)—C₄₋₁₂]—C—O—C(O)—C₄₋₁₂ saturated or unsaturated hydrocarbon chain; and R₈′ is a —C₆₋₁₆ saturated hydrocarbon chain.

[0327] In an embodiment, X is —CH(—R₆)—R₇, R₆ is —(CH₂)ₚ—O—C(O)—R₈, R₇ is —(CH₂)_{p′}—O—C(O)—R₈′, p and p′ are independently 0, 1, 2, 3 or 4; and R₈ is a —C[—C—O—C(O)—C₄₋₁₂]—C—O—C(O)—C₄₋₁₂ saturated or unsaturated hydrocarbon chain; and R₈′ is a —C(—C₆₋₁₆)—C₆₋₁₆ saturated or unsaturated hydrocarbon chain.

[0328] In an embodiment, X is —CH(—R₆)—R₇, R₆ is —(CH₂)ₚ—O—C(O)—R₈, R₇ is —(CH₂)ₚ—O—C(O)—R₈′, p and p′ are independently 0, 1, 2, 3 or 4; and R₈ is a —C[—C—O—C(O)—C₄₋₁₂]—C—O—C(O)—C₄₋₁₂ saturated or unsaturated hydrocarbon chain; and R₈′ is a —C[—C—O—C(O)—C₄₋₁₂]—C—O—C(O)—C₄₋₁₂ saturated or unsaturated hydrocarbon chain.

[0329] In an embodiment, X is —CH(—R₆)—R₇, R₆ is —(CH₂)ₚ—O—C(O)—R₈, R₇ is —(CH₂)_{p′}—O—C(O)—R₈′, p and p′ are independently 0, 1, 2, 3 or 4; and R₈ is a —C[—C—O—C(O)—C₄₋₁₂]—C—O—C(O)—C₄₋₁₂ saturated or unsaturated hydrocarbon chain; and R₈′ is a —C₆₋₁₆ saturated or unsaturated hydrocarbon chain.

[0330] In an embodiment, X is —CH(—R₆)—R₇, R₆ is —(CH₂)ₚ—O—C(O)—R₈, R₇ is —(CH₂)_{p′}—O—C(O)—R₈′, p and p′ are independently 0, 1, 2, 3 or 4; and R₈ is a —C₆₋₁₆ saturated or unsaturated hydrocarbon chain; and R₈′ is a —C₈₋₂₀ hydrocarbon chain having one or two cis alkene groups at either or both of the omega 6 and 9 positions.

[0331] In an embodiment, X is —CH(—R₆)—R₇, R₆ is —(CH₂)ₚ—O—C(O)—R₈, R₇ is —(CH₂)_{p′}—O—C(O)—R₈′, p and p′ are independently 0, 1, 2, 3 or 4; and R₈ is a —C₆₋₁₆ saturated or unsaturated hydrocarbon chain; and R₈′ is a —C₁₋₃—C(—O—C₆₋₁₂)—O—C₆₋₁₂ saturated or unsaturated hydrocarbon chain.

[0332] In an embodiment, X is —CH(—R₆)—R₇, R₆ is —(CH₂)ₚ—O—C(O)—R₈, R₇ is —(CH₂)_{p′}—O—C(O)—R₈′, p and p′ are independently 0, 1, 2, 3 or 4; and R₈ is a —C₆₋₁₆ saturated or unsaturated hydrocarbon chain; and R₈′ is a —C₆₋₁₆ saturated hydrocarbon chain.

[0333] In an embodiment, X is —CH(—R₆)—R₇, R₆ is —(CH₂)ₚ—O—C(O)—R₈, R₇ is —(CH₂)_{p′}—O—C(O)—R₈′, p and p′ are independently 0, 1, 2, 3 or 4; and R₈ is a —C₆₋₁₆ saturated or unsaturated hydrocarbon chain; and R₈′ is a —C(—C₆₋₁₆)—C₆₋₁₆ saturated or unsaturated hydrocarbon chain.

[0334] In an embodiment, X is —CH(—R₆)—R₇, R₆ is —(CH₂)ₚ—O—C(O)—R₈, R₇ is —(CH₂)_{p′}—O—C(O)—R₈′, p and p′ are independently 0, 1, 2, 3 or 4; and R₈ is a —C₆₋₁₆ saturated or unsaturated hydrocarbon chain; and R₈′ is a —C[—C—O—C(O)—C₄₋₁₂]—C—O—C(O)—C₄₋₁₂ saturated or unsaturated hydrocarbon chain.

[0335] In an embodiment, X is —CH(—R₆)—R₇, R₆ is —(CH₂)ₚ—O—C(O)—R₈, R₇ is —(CH₂)_{p′}—O—C(O)—R₈′, p and p′ are independently 0, 1, 2, 3 or 4; and R₈ is a —C₆₋₁₆ saturated or unsaturated hydrocarbon chain; and R₈′ is a —C₆₋₁₆ saturated or unsaturated hydrocarbon chain.

[0336] In an embodiment, X is —CH(—R₆)—R₇, R₆ is —(CH₂)ₚ—O—C(O)—R₈, R₇ is —C_{p′}—R₈′, p and p′ are independently 0, 1, 2, 3 or 4; R₈ is a —C₈₋₂₀ hydrocarbon chain having one or two cis alkene groups at either or both of the omega 6 and 9 positions; and R₈′ is a —C₈₋₂₀ hydrocarbon chain having one or two cis alkene groups at either or both of the omega 6 and 9 positions.

[0337] In an embodiment, X is —CH(—R₆)—R₇, R₆ is —(CH₂)ₚ—O—C(O)—R₈, R₇ is —C_{p′}—R₈′, p and p′ are independently 0, 1, 2, 3 or 4; R₈ is a —C₈₋₂₀ hydrocarbon chain having one or two cis alkene groups at either or both of the omega 6 and 9 positions; and R₈′ is a —C₁₋₃—C(—O—C₆₋₁₂)—O—C₆₋₁₂ saturated or unsaturated hydrocarbon chain.

[0338] In an embodiment, X is —CH(—R₆)—R₇, R₆ is —(CH₂)ₚ—O—C(O)—R₈, R₇ is —C_{p′}—R₈′, p and p′ are independently 0, 1, 2, 3 or 4; R₈ is a —C₈₋₂₀ hydrocarbon chain having one or two cis alkene groups at either or both of the omega 6 and 9 positions; and R₈′ is a —C₆₋₁₆ saturated hydrocarbon chain.

[0339] In an embodiment, X is —CH(—R₆)—R₇, R₆ is —(CH₂)ₚ—O—C(O)—R₈, R₇ is —C_{p′}—R₈′, p and p′ are independently 0, 1, 2, 3 or 4; R₈ is a —C₈₋₂₀ hydrocarbon chain having one or two cis alkene groups at either or both of the omega 6 and 9 positions; and R₈′ is a —C(—C₆₋₁₆)—C₆₋₁₆ saturated or unsaturated hydrocarbon chain.

[0340] In an embodiment, X is —CH(—R₆)—R₇, R₆ is —(CH₂)ₚ—O—C(O)—R₈, R₇ is —C_{p′}—R₈′, p and p′ are independently 0, 1, 2, 3 or 4; R₈ is a —C₈₋₂₀ hydrocarbon chain having one or two cis alkene groups at either or both of the omega 6 and 9 positions; and R₈′ is a —C[—C—O—C(O)—C₄₋₁₂]—C—O—C(O)—C₄₋₁₂ saturated or unsaturated hydrocarbon chain.

[0341] In an embodiment, X is —CH(—R₆)—R₇, R₆ is —(CH₂)ₚ—O—C(O)—R₈, R₇ is —C_{p′}—R₈′, p and p′ are independently 0, 1, 2, 3 or 4; R₈ is a —C₈₋₂₀ hydrocarbon chain having one or two cis alkene groups at either or both of the omega 6 and 9 positions; and R₈′ is a —C₆₋₁₆ saturated or unsaturated hydrocarbon chain.

[0342] In an embodiment, X is —CH(—R₆)—R₇, R₆ is —(CH₂)ₚ—O—C(O)—R₈, R₇ is —C_{p′}—R₈′, p and p′ are independently 0, 1, 2, 3 or 4; R₈ is a-C₁₋₃—C(—O—C₆₁₂)—O—C₆₋₁₂ saturated or unsaturated hydrocarbon chain; and R₈′ is a —C₈₋₂₀ hydrocarbon chain having one or two cis alkene groups at either or both of the omega 6 and 9 positions.

[0343] In an embodiment, X is —CH(—R₆)—R₇, R₆ is —(CH₂)ₚ—O—C(O)—R₈, R₇—C_{p′}—R₈′, p and p′ are independently 0, 1, 2, 3 or 4; R₈ is —C₁₋₃—C(—O—C₆₋₁₂)—O—C₆₋₁₂ saturated or unsaturated hydrocarbon chain; and R₈′ is a —C₁₋₃—C(—O—C₆₋₁₂)—O—C₆₋₁₂ saturated or unsaturated hydrocarbon chain.

[0344] In an embodiment, X is —CH(—R₆)—R₇, R₆ is —(CH₂)ₚ—O—C(O)—R₈, R₇ is —C_{p′}—R₈′, p and p′ are independently 0, 1, 2, 3 or 4; R₈ is a-C₁₋₃—C(—O—C₆₁₂)—O—C₆₋₁₂ saturated or unsaturated hydrocarbon chain; and R₈′ is a —C₆₋₁₆ saturated hydrocarbon chain.

[0345] In an embodiment, X is —CH(—R₆)—R₇, R₆ is —(CH₂)ₚ—O—C(O)—R₈, R₇ is —C_{p′}—R₈′, p and p′ are independently 0, 1, 2, 3 or 4; R₈ is a-C₁₋₃—C(—O—C₆₁₂)—O—C₆₋₁₂ saturated or unsaturated hydrocarbon chain; and R₈′ is a —C(—C₆₋₁₆)—C₆₋₁₆ saturated or unsaturated hydrocarbon chain.

[0346] In an embodiment, X is —CH(—R₆)—R₇, R₆ is —(CH₂)ₚ—O—C(O)—R₈, R₇ is —C_{p′}—R₈′, p and p′ are independently 0, 1, 2, 3 or 4; R₈ is a-C₁₋₃—C(—O—C₆₁₂)—O—C₆₋₁₂ saturated or unsaturated hydrocarbon chain; and R₈′ is a —C[—C—O—C(O)—C₄₋₁₂]—C—O—C(O)—C₄₋₁₂ saturated or unsaturated hydrocarbon chain.

[0347] In an embodiment, X is —CH(—R₆)—R₇, R₆ is —(CH₂)_{p′}—O—C(O)—R₈, R₇ is —C_{p′}—R₈′, p and p′ are independently 0, 1, 2, 3 or 4; R₈ is a-C₁₋₃—C(—O—C₆₁₂)—O—C₆₋₁₂ saturated or unsaturated hydrocarbon chain; and R₈′ is a —C₆₋₁₆ saturated or unsaturated hydrocarbon chain.

[0348] In an embodiment, X is —CH(—R₆)—R₇, R₆ is —(CH₂)ₚ—O—C(O)—R₈, R₇ is —C_{p′}—R₈′, p and p′ are independently 0, 1, 2, 3 or 4; R₈ is a —C₆₋₁₆ saturated hydrocarbon chain; and R₈′ is a —C₈₋₂₀ hydrocarbon chain having one or two cis alkene groups at either or both of the omega 6 and 9 positions.

[0349] In an embodiment, X is —CH(—R₆)—R₇, R₆ is —(CH₂)ₚ—O—C(O)—R₈, R₇ is —C_{p′}—R₈′, p and p′ are independently 0, 1, 2, 3 or 4; R₈ is a —C₆₋₁₆ saturated hydrocarbon chain; and R₈′ is a —C₁₋₃—C(—O—C₆₋₁₂)—O—C₆₋₁₂ saturated or unsaturated hydrocarbon chain.

[0350] In an embodiment, X is —CH(—R₆)—R₇, R₆ is —(CH₂)ₚ—O—C(O)—R₈, R₇ is —C_{p′}—R₈′, p and p′ are independently 0, 1, 2, 3 or 4; R₈ is a —C₆₋₁₆ saturated hydrocarbon chain; and R₈′ is a —C₆₋₁₆ saturated hydrocarbon chain.

[0351] In an embodiment, X is —CH(—R₆)—R₇, R₆ is —(CH₂)ₚ—O—C(O)—R₈, R₇ is —C_{p′}—R₈′, p and p′ are independently 0, 1, 2, 3 or 4; R₈ is a —C₆₋₁₆ saturated hydrocarbon chain; and R₈′ is a —C(—C₆₋₁₆)—C₆16 saturated or unsaturated hydrocarbon chain.

[0352] In an embodiment, X is —CH(—R₆)—R₇, R₆ is —(CH₂)ₚ—O—C(O)—R₈, R₇ is —C_{p′}—R₈′, p and p′ are independently 0, 1, 2, 3 or 4; R₈ is a —C₆₋₁₆ saturated hydrocarbon chain; and R₈′ is a —C[—C—O—C(O)—C₄₋₁₂]—C—O—C(O)—C₄₋₁₂ saturated or unsaturated hydrocarbon chain.

[0353] In an embodiment, X is —CH(—R₆)—R₇, R₆ is —(CH₂)ₚ—O—C(O)—R₈, R₇ is —C_{p′}—R₈′, p and p′ are independently 0, 1, 2, 3 or 4; R₈ is a —C₆₋₁₆ saturated hydrocarbon chain; and R₈′ is a —C₆₋₁₆ saturated or unsaturated hydrocarbon chain.

[0354] In an embodiment, X is —CH(—R₆)—R₇, R₆ is —(CH₂)ₚ—O—C(O)—R₈, R₇ is —C_{p′}—R₈′, p and p′ are independently 0, 1, 2, 3 or 4; and R₈ is a —C(—C₆₋₁₆)—C₆₋₁₆ saturated or unsaturated hydrocarbon chain; and R₈′ is a —C₈₋₂₀ hydrocarbon chain having one or two cis alkene groups at either or both of the omega 6 and 9 positions.

[0355] In an embodiment, X is —CH(—R₆)—R₇, R₆ is —(CH₂)ₚ—O—C(O)—R₈, R₇ is —C_{p′}—R₈′, p and p′ are independently 0, 1, 2, 3 or 4; and R₈ is a —C(—C₆₋₁₆)—C₆₋₁₆ saturated or unsaturated hydrocarbon chain; and R₈′ is a —C₁₋₃—C(—O—C₆₋₁₂)—O—C₆₋₁₂ saturated or unsaturated hydrocarbon chain.

[0356] In an embodiment, X is —CH(—R₆)—R₇, R₆ is —(CH₂)ₚ—O—C(O)—R₈, R₇ is —C_{p′}—R₈′, p and p′ are independently 0, 1, 2, 3 or 4; and R₈ is a —C(—C₆₋₁₆)—C₆₋₁₆ saturated or unsaturated hydrocarbon chain; and R₈′ is a —C₆₋₁₆ saturated hydrocarbon chain.

[0357] In an embodiment, X is —CH(—R₆)—R₇, R₆ is —(CH₂)ₚ—O—C(O)—R₈, R₇ is —C_{p′}—R₈′, p and p′ are independently 0, 1, 2, 3 or 4; and R₈ is a —C(—C₆₋₁₆)—C₆₋₁₆ saturated or unsaturated hydrocarbon chain; and R₈′ is a —C(—C₆₋₁₆)—C₆₋₁₆ saturated or unsaturated hydrocarbon chain.

[0358] In an embodiment, X is —CH(—R₆)—R₇, R₆ is —(CH₂)ₚ—O—C(O)—R₈, R₇ is —C_{p′}—R₈′, p and p′ are independently 0, 1, 2, 3 or 4; and R₈ is a —C(—C₆₋₁₆)—C₆₋₁₆ saturated or unsaturated hydrocarbon chain; and R₈′ is a —C[—C—O—C(O)—C₄₋₁₂]—C—O—C(O)—C₄₋₁₂ saturated or unsaturated hydrocarbon chain.

[0359] In an embodiment, X is —CH(—R₆)—R₇, R₆ is —(CH₂)ₚ—O—C(O)—R₈, R₇ is —C_{p′}—R₈′, p and p′ are independently 0, 1, 2, 3 or 4; and R₈ is a —C(—C₆₋₁₆)—C₆₋₁₆ saturated or unsaturated hydrocarbon chain; and R₈′ is a —C₆₋₁₆ saturated or unsaturated hydrocarbon chain.

[0360] In an embodiment, X is —CH(—R₆)—R₇, R₆ is —(CH₂)ₚ—O—C(O)—R₈, R₇ is —C_{p′}—R₈′, p and p′ are independently 0, 1, 2, 3 or 4; and R₈ is a —C[—C—O—C(O)—C₄₋₁₂]—C—O—C(O)—C₄₋₁₂ saturated or unsaturated hydrocarbon chain; and R₈′ is a —C₈₋₂₀ hydrocarbon chain having one or two cis alkene groups at either or both of the omega 6 and 9 positions.

[0361] In an embodiment, X is —CH(—R₆)—R₇, R₆ is —(CH₂)ₚ—O—C(O)—R₈, R₇ is —C_{p′}—R₈′, p and p′ are independently 0, 1, 2, 3 or 4; and R₈ is a —C[—C—O—C(O)—C₄₋₁₂]—C—O—C(O)—C₄₋₁₂ saturated or unsaturated hydrocarbon chain; and R₈′ is a —C₁₋₃—C(—O—C₆₋₁₂)—O—C₆₋₁₂ saturated or unsaturated hydrocarbon chain.

[0362] In an embodiment, X is —CH(—R₆)—R₇, R₆ is —(CH₂)ₚ—O—C(O)—R₈, R₇ is —C_{p′}—R₈′, p and p′ are independently 0, 1, 2, 3 or 4; and R₈ is a —C[—C—O—C(O)—C₄₋₁₂]—C—O—C(O)—C₄₋₁₂ saturated or unsaturated hydrocarbon chain; and R₈′ is a —C₆₋₁₆ saturated hydrocarbon chain.

[0363] In an embodiment, X is —CH(—R₆)—R₇, R₆ is —(CH₂)ₚ—O—C(O)—R₈, R₇ is —C_{p′}—R₈′, p and p′ are independently 0, 1, 2, 3 or 4; and R₈ is a —C[—C—O—C(O)—C₄₋₁₂]—C—O—C(O)—C₄₋₁₂ saturated or unsaturated hydrocarbon chain; and R₈′ is a —C(—C₆₋₁₆)—C₆₋₁₆ saturated or unsaturated hydrocarbon chain.

[0364] In an embodiment, X is —CH(—R₆)—R₇, R₆ is —(CH₂)ₚ—O—C(O)—R₈, R₇ is —C_{p′}—R₈′, p and p′ are independently 0, 1, 2, 3 or 4; and R₈ is a —C[—C—O—C(O)—C₄₋₁₂]—C—O—C(O)—C₄₋₁₂ saturated or unsaturated hydrocarbon chain; and R₈′ is a —C[—C—O—C(O)—C₄₋₁₂]—C—O—C(O)—C₄₋₁₂ saturated or unsaturated hydrocarbon chain.

[0365] In an embodiment, X is —CH(—R₆)—R₇, R₆ is —(CH₂)ₚ—O—C(O)—R₈, R₇ is —C_{p′}—R₈′, p and p′ are independently 0, 1, 2, 3 or 4; and R₈ is a —C[—C—O—C(O)—C₄₋₁₂]—C—O—C(O)—C₄₋₁₂ saturated or unsaturated hydrocarbon chain; and R₈′ is a —C₆₋₁₆ saturated or unsaturated hydrocarbon chain.

[0366] In an embodiment, X is —CH(—R₆)—R₇, R₆ is —(CH₂)ₚ—O—C(O)—R₈, R₇ is —C_{p′}—R₈′, p and p′ are independently 0, 1, 2, 3 or 4; and R₈ is a —C₆₋₁₆ saturated or unsaturated hydrocarbon chain; and R₈′ is a —C₈₋₂₀ hydrocarbon chain having one or two cis alkene groups at either or both of the omega 6 and 9 positions.

[0367] In an embodiment, X is —CH(—R₆)—R₇, R₆ is —(CH₂)ₚ—O—C(O)—R₈, R₇ is C_{p′}—R₈′, p and p′ are independently 0, 1, 2, 3 or 4; and R₈ is a —C₆₋₁₆ saturated or unsaturated hydrocarbon chain; and R₈′ is a —C₁₋₃—C(—O—C₆₋₁₂)—O—C₆₋₁₂ saturated or unsaturated hydrocarbon chain.

[0368] In an embodiment, X is —CH(—R₆)—R₇, R₆ is —(CH₂)ₚ—O—C(O)—R₈, R₇ is —C_{p′}—R₈′, p and p′ are independently 0, 1, 2, 3 or 4; and R₈ is a —C₆₋₁₆ saturated or unsaturated hydrocarbon chain; and R₈′ is a —C₆₋₁₆ saturated hydrocarbon chain.

[0369] In an embodiment, X is —CH(—R₆)—R₇, R₆ is —(CH₂)ₚ—O—C(O)—R₈, R₇ is —C_{p′}—R₈′, p and p′ are independently 0, 1, 2, 3 or 4; and R₈ is a —C₆₋₁₆ saturated or unsaturated hydrocarbon chain; and R₈′ is a —C(—C₆₋₁₆)—C₆₋₁₆ saturated or unsaturated hydrocarbon chain.

[0370] In an embodiment, X is —CH(—R₆)—R₇, R₆ is —(CH₂)ₚ—O—C(O)—R₈, R₇ is —C_{p′}—R₈′, p and p′ are independently 0, 1, 2, 3 or 4; and R₈ is a —C₆₋₁₆ saturated or unsaturated hydrocarbon chain; and R₈′ is a —C[—C—O—C(O)—C₄₋₁₂]—C—O—C(O)—C₄₋₁₂ saturated or unsaturated hydrocarbon chain.

[0371] In an embodiment, X is —CH(—R₆)—R₇, R₆ is —(CH₂)ₚ—O—C(O)—R₈, R₇ is —C_{p′}—R₈′, p and p′ are independently 0, 1, 2, 3 or 4; and R₈ is a —C₆₋₁₆ saturated or unsaturated hydrocarbon chain; and R₈′ is a —C₆₋₁₆ saturated or unsaturated hydrocarbon chain.

[0372] In an embodiment, X is —CH(—R₆)—R₇, R₆ is —Cₚ—R₈, R₇ is —(CH₂)_{p′}—O—C(O)—R₈′, p and p′ are independently 0, 1, 2, 3 or 4; R₈ is a —C₈₋₂₀ hydrocarbon chain having one or two cis alkene groups at either or both of the omega 6 and 9 positions; and R₈′ is a —C₈₋₂₀ hydrocarbon chain having one or two cis alkene groups at either or both of the omega 6 and 9 positions.

[0373] In an embodiment, X is —CH(—R₆)—R₇, R₆ is —Cₚ—R₈, R₇ is —(CH₂)_{p′}—O—C(O)—R₈′, p and p′ are independently 0, 1, 2, 3 or 4; R₈ is a —C₈₋₂₀ hydrocarbon chain having one or two cis alkene groups at either or both of the omega 6 and 9 positions; and R₈′ is a —C₁₋₃—C(—O—C₆₋₁₂)—O—C₆₋₁₂ saturated or unsaturated hydrocarbon chain.

[0374] In an embodiment, X is —CH(—R₆)—R₇, R₆ is —Cₚ—R₈, R₇ is —(CH₂)_{p′}—O—C(O)—R₈′, p and p′ are independently 0, 1, 2, 3 or 4; R₈ is a —C₈₋₂₀ hydrocarbon chain having one or two cis alkene groups at either or both of the omega 6 and 9 positions; and R₈′ is a —C₆₋₁₆ saturated hydrocarbon chain.

[0375] In an embodiment, X is —CH(—R₆)—R₇, R₆ is —Cₚ—R₈, R₇ is —(CH₂)_{p′}—O—C(O)—R₈′, p and p′ are independently 0, 1, 2, 3 or 4; R₈ is a —C₈₋₂₀ hydrocarbon chain having one or two cis alkene groups at either or both of the omega 6 and 9 positions; and R₈′ is a —C(—C₆₋₁₆)—C₆₋₁₆ saturated or unsaturated hydrocarbon chain.

[0376] In an embodiment, X is —CH(—R₆)—R₇, R₆ is —Cₚ—R₈, R₇ is —(CH₂)_{p′}—O—C(O)—R₈′, p and p′ are independently 0, 1, 2, 3 or 4; R₈ is a —C₈₋₂₀ hydrocarbon chain having one or two cis alkene groups at either or both of the omega 6 and 9 positions; and R₈′ is a —C[—C—O—C(O)—C₄₋₁₂]—C—O—C(O)—C₄₋₁₂ saturated or unsaturated hydrocarbon chain.

[0377] In an embodiment, X is —CH(—R₆)—R₇, R₆ is —Cₚ—R₈, R₇ is —(CH₂)_{p′}—O—C(O)—R₈′, p and p′ are independently 0, 1, 2, 3 or 4; R₈ is a —C₈₋₂₀ hydrocarbon chain having one or two cis alkene groups at either or both of the omega 6 and 9 positions; and R₈′ is a —C₆₋₁₆ saturated or unsaturated hydrocarbon chain.

[0378] In an embodiment, X is —CH(—R₆)—R₇, R₆ is —Cₚ—R₈, R₇ is —(CH₂)_{p′}—O—C(O)—R₈′, p and p′ are independently 0, 1, 2, 3 or 4; R₈ is a-C₁₋₃—C(—O—C₆₁₂)—O—C₆₋₁₂ saturated or unsaturated hydrocarbon chain; and R₈′ is a —C₈₋₂₀ hydrocarbon chain having one or two cis alkene groups at either or both of the omega 6 and 9 positions.

[0379] In an embodiment, X is —CH(—R₆)—R₇, R₆ is —Cₚ—R₈, R₇ is —(CH₂)_{p′}—O—C(O)—R₈′, p and p′ are independently 0, 1, 2, 3 or 4; R₈ is —C₁₋₃—C(—O—C₆₋₁₂)—O—C₆₋₁₂ saturated or unsaturated hydrocarbon chain; and R₈′ is a —C₁₋₃—C(—O—C₆₋₁₂)—O—C₆₋₁₂ saturated or unsaturated hydrocarbon chain.

[0380] In an embodiment, X is —CH(—R₆)—R₇, R₆ is —Cₚ—R₈, R₇ is —(CH₂)_{p′}—O—C(O)—R₈′, p and p′ are independently 0, 1, 2, 3 or 4; R₈ is a-C₁₋₃—C(—O—C₆₁₂)—O—C₆₋₁₂ saturated or unsaturated hydrocarbon chain; and R₈′ is a —C₆₋₁₆ saturated hydrocarbon chain.

[0381] In an embodiment, X is —CH(—R₆)—R₇, R₆ is —Cₚ—R₈, R₇ is —(CH₂)_{p′}—O—C(O)—R₈′, p and p′ are independently 0, 1, 2, 3 or 4; R₈ is a-C₁₋₃—C(—O—C₆₁₂)—O—C₆₋₁₂ saturated or unsaturated hydrocarbon chain; and R₈′ is a —C(—C₆₋₁₆)—C₆₋₁₆ saturated or unsaturated hydrocarbon chain.

[0382] In an embodiment, X is —CH(—R₆)—R₇, R₆ is —Cₚ—R₈, R₇ is —(CH₂)_{p′}—O—C(O)—R₈′, p and p′ are independently 0, 1, 2, 3 or 4; R₈ is a-C₁₋₃—C(—O—C₆₁₂)—O—C₆₋₁₂ saturated or unsaturated hydrocarbon chain; and R₈′ is a —C[—C—O—C(O)—C₄₋₁₂]—C—O—C(O)—C₄₋₁₂ saturated or unsaturated hydrocarbon chain.

[0383] In an embodiment, X is —CH(—R₆)—R₇, R₆ is —Cₚ—R₈, R₇ is —(CH₂)_{p′}—O—C(O)—R₈′, p and p′ are independently 0, 1, 2, 3 or 4; R₈ is a-C₁₋₃—C(—O—C₆₁₂)—O—C₆₋₁₂ saturated or unsaturated hydrocarbon chain; and R₈′ is a —C₆₋₁₆ saturated or unsaturated hydrocarbon chain.

[0384] In an embodiment, X is —CH(—R₆)—R₇, R₆ is —Cₚ—R₈, R₇ is —(CH₂)_{p′}—O—C(O)—R₈′, p and p′ are independently 0, 1, 2, 3 or 4; R₈ is a —C₆₋₁₆ saturated hydrocarbon chain; and R₈′ is a —C₈₋₂₀ hydrocarbon chain having one or two cis alkene groups at either or both of the omega 6 and 9 positions.

[0385] In an embodiment, X is —CH(—R₆)—R₇, R₆ is —Cₚ—R₈, R₇ is —(CH₂)_{p′}—O—C(O)—R₈′, p and p′ are independently 0, 1, 2, 3 or 4; R₈ is a —C₆₋₁₆ saturated hydrocarbon chain; and R₈′ is a —C₁₋₃—C(—O—C₆₋₁₂)—O—C₆₋₁₂ saturated or unsaturated hydrocarbon chain.

[0386] In an embodiment, X is —CH(—R₆)—R₇, R₆ is —Cₚ—R₈, R₇ is —(CH₂)_{p′}—O—C(O)—R₈′, p and p′ are independently 0, 1, 2, 3 or 4; R₈ is a —C₆₋₁₆ saturated hydrocarbon chain; and R₈′ is a —C₆₋₁₆ saturated hydrocarbon chain.

[0387] In an embodiment, X is —CH(—R₆)—R₇, R₆ is —Cₚ—R₈, R₇ is —(CH₂)_{p′}—O—C(O)—R₈′, p and p′ are independently 0, 1, 2, 3 or 4; R₈ is a —C₆₋₁₆ saturated hydrocarbon chain; and R₈′ is a —C(—C₆₋₁₆)—C₆₋₁₆ saturated or unsaturated hydrocarbon chain.

[0388] In an embodiment, X is —CH(—R₆)—R₇, R₆ is —Cₚ—R₈, R₇ is —(CH₂)_{p′}—O—C(O)—R₈′, p and p′ are independently 0, 1, 2, 3 or 4; R₈ is a —C₆₋₁₆ saturated hydrocarbon chain; and R₈′ is a —C[—C—O—C(O)—C₄₋₁₂]—C—O—C(O)—C₄₋₁₂ saturated or unsaturated hydrocarbon chain.

[0389] In an embodiment, X is —CH(—R₆)—R₇, R₆ is —Cₚ—R₈, R₇ is —(CH₂)_{p′}—O—C(O)—R₈′, p and p′ are independently 0, 1, 2, 3 or 4; R₈ is a —C₆₋₁₆ saturated hydrocarbon chain; and R₈′ is a —C₆₋₁₆ saturated or unsaturated hydrocarbon chain.

[0390] In an embodiment, X is —CH(—R₆)—R₇, R₆ is —Cₚ—R₈, R₇ is —(CH₂)_{p′}—O—C(O)—R₈′, p and p′ are independently 0, 1, 2, 3 or 4; and R₈ is a —C(—C₆₋₁₆)—C₆₋₁₆ saturated or unsaturated hydrocarbon chain; and R₈′ is a —C₈₋₂₀ hydrocarbon chain having one or two cis alkene groups at either or both of the omega 6 and 9 positions.

[0391] In an embodiment, X is —CH(—R₆)—R₇, R₆ is —Cₚ—R₈, R₇ is —(CH₂)_{p′}—O—C(O)—R₈′, p and p′ are independently 0, 1, 2, 3 or 4; and R₈ is a —C(—C₆₋₁₆)—C₆₋₁₆ saturated or unsaturated hydrocarbon chain; and R₈′ is a —C₁₋₃—C(—O—C₆₋₁₂)—O—C₆₋₁₂ saturated or unsaturated hydrocarbon chain.

[0392] In an embodiment, X is —CH(—R₆)—R₇, R₆ is —Cₚ—R₈, R₇ is —(CH₂)_{p′}—O—C(O)—R₈′, p and p′ are independently 0, 1, 2, 3 or 4; and R₈ is a —C(—C₆₋₁₆)—C₆₋₁₆ saturated or unsaturated hydrocarbon chain; and R₈′ is a —C₆₋₁₆ saturated hydrocarbon chain.

[0393] In an embodiment, X is —CH(—R₆)—R₇, R₆ is —Cₚ—R₈, R₇ is —(CH₂)_{p′}—O—C(O)—R₈′, p and p′ are independently 0, 1, 2, 3 or 4; and R₈ is a —C(—C₆₋₁₆)—C₆₋₁₆ saturated or unsaturated hydrocarbon chain; and R₈′ is a —C(—C₆₋₁₆)—C₆₋₁₆ saturated or unsaturated hydrocarbon chain.

[0394] In an embodiment, X is —CH(—R₆)—R₇, R₆ is —Cₚ—R₈, R₇ is —(CH₂)_{p′}—O—C(O)—R₈′, p and p′ are independently 0, 1, 2, 3 or 4; and R₈ is a —C(—C₆₋₁₆)—C₆₋₁₆ saturated or unsaturated hydrocarbon chain; and R₈′ is a —C[—C—O—C(O)—C₄₋₁₂]—C—O—C(O)—C₄₋₁₂ saturated or unsaturated hydrocarbon chain.

[0395] In an embodiment, X is —CH(—R₆)—R₇, R₆ is —Cₚ—R₈, R₇ is —(CH₂)_{p′}—O—C(O)—R₈′, p and p′ are independently 0, 1, 2, 3 or 4; and R₈ is a —C(—C₆₋₁₆)—C₆₋₁₆ saturated or unsaturated hydrocarbon chain; and R₈′ is a —C₆₋₁₆ saturated or unsaturated hydrocarbon chain.

[0396] In an embodiment, X is —CH(—R₆)—R₇, R₆ is —Cₚ—R₈, R₇ is —(CH₂)_{p′}—O—C(O)—R₈′, p and p′ are independently 0, 1, 2, 3 or 4; and R₈ is a —C[—C—O—C(O)—C₄₋₁₂]—C—O—C(O)—C₄₋₁₂ saturated or unsaturated hydrocarbon chain; and R₈′ is a —C₈₋₂₀ hydrocarbon chain having one or two cis alkene groups at either or both of the omega 6 and 9 positions.

[0397] In an embodiment, X is —CH(—R₆)—R₇, R₆ is —Cₚ—R₈, R₇ is —(CH₂)_{p′}—O—C(O)—R₈′, p and p′ are independently 0, 1, 2, 3 or 4; and R₈ is a —C[—C—O—C(O)—C₄₋₁₂]—C—O—C(O)—C₄₋₁₂ saturated or unsaturated hydrocarbon chain; and R₈′ is a —C₁₋₃—C(—O—C₆₋₁₂)—O—C₆₋₁₂ saturated or unsaturated hydrocarbon chain.

[0398] In an embodiment, X is —CH(—R₆)—R₇, R₆ is —Cₚ—R₈, R₇ is —(CH₂)_{p′}—O—C(O)—R₈′, p and p′ are independently 0, 1, 2, 3 or 4; and R₈ is a —C[—C—O—C(O)—C₄₋₁₂]—C—O—C(O)—C₄₋₁₂ saturated or unsaturated hydrocarbon chain; and R₈′ is a —C₆₋₁₆ saturated hydrocarbon chain.

[0399] In an embodiment, X is —CH(—R₆)—R₇, R₆ is —Cₚ—R₈, R₇ is —(CH₂)_{p′}—O—C(O)—R₈′, p and p′ are independently 0, 1, 2, 3 or 4; and R₈ is a —C[—C—O—C(O)—C₄₋₁₂]—C—O—C(O)—C₄₋₁₂ saturated or unsaturated hydrocarbon chain; and R₈′ is a —C(—C₆₋₁₆)—C₆₋₁₆ saturated or unsaturated hydrocarbon chain.

[0400] In an embodiment, X is —CH(—R₆)—R₇, R₆ is —Cₚ—R₈, R₇ is —(CH₂)_{p′}—O—C(O)—R₈′, p and p′ are independently 0, 1, 2, 3 or 4; and R₈ is a —C[—C—O—C(O)—C₄₋₁₂]—C—O—C(O)—C₄₋₁₂ saturated or unsaturated hydrocarbon chain; and R₈′ is a —C[—C—O—C(O)—C₄₋₁₂]—C—O—C(O)—C₄₋₁₂ saturated or unsaturated hydrocarbon chain.

[0401] In an embodiment, X is —CH(—R₆)—R₇, R₆ is —Cₚ—R₈, R₇ is —(CH₂)_{p′}—O—C(O)—R₈′, p and p′ are independently 0, 1, 2, 3 or 4; and R₈ is a —C[—C—O—C(O)—C₄₋₁₂]—C—O—C(O)—C₄₋₁₂ saturated or unsaturated hydrocarbon chain; and R₈′ is a —C₆₋₁₆ saturated or unsaturated hydrocarbon chain.

[0402] In an embodiment, X is —CH(—R₆)—R₇, R₆ is —Cₚ—R₈, R₇ is —(CH₂)_{p′}—O—C(O)—R₈′, p and p′ are independently 0, 1, 2, 3 or 4; and R₈ is a —C₆₋₁₆ saturated or unsaturated hydrocarbon chain; and R₈′ is a —C₈₋₂₀ hydrocarbon chain having one or two cis alkene groups at either or both of the omega 6 and 9 positions.

[0403] In an embodiment, X is —CH(—R₆)—R₇, R₆ is —Cₚ—R₈, R₇ is —(CH₂)_{p′}—O—C(O)—R₈′, p and p′ are independently 0, 1, 2, 3 or 4; and R₈ is a —C₆₋₁₆ saturated or unsaturated hydrocarbon chain; and R₈′ is a —C₁₋₃—C(—O—C₆₋₁₂)—O—C₆₋₁₂ saturated or unsaturated hydrocarbon chain.

[0404] In an embodiment, X is —CH(—R₆)—R₇, R₆ is —Cₚ—R₈, R₇ is —(CH₂)_{p′}—O—C(O)—R₈′, p and p′ are independently 0, 1, 2, 3 or 4; and R₈ is a —C₆₋₁₆ saturated or unsaturated hydrocarbon chain; and R₈′ is a —C₆₋₁₆ saturated hydrocarbon chain.

[0405] In an embodiment, X is —CH(—R₆)—R₇, R₆ is —Cₚ—R₈, R₇ is —(CH₂)_{p′}—O—C(O)—R₈′, p and p′ are independently 0, 1, 2, 3 or 4; and R₈ is a —C₆₋₁₆ saturated or unsaturated hydrocarbon chain; and R₈′ is a —C(—C₆₋₁₆)—C₆₋₁₆ saturated or unsaturated hydrocarbon chain.

[0406] In an embodiment, X is —CH(—R₆)—R₇, R₆ is —Cₚ—R₈, R₇ is —(CH₂)_{p′}—O—C(O)—R₈′, p and p′ are independently 0, 1, 2, 3 or 4; and R₈ is a —C₆₋₁₆ saturated or unsaturated hydrocarbon chain; and R₈′ is a —C[—C—O—C(O)—C₄₋₁₂]—C—O—C(O)—C₄₋₁₂ saturated or unsaturated hydrocarbon chain.

[0407] In an embodiment, X is —CH(—R₆)—R₇, R₆ is —Cₚ—R₈, R₇ is —(CH₂)_{p′}—O—C(O)—R₈′, p and p′ are independently 0, 1, 2, 3 or 4; and R₈ is a —C₆₋₁₆ saturated or unsaturated hydrocarbon chain; and R₈′ is a —C₆₋₁₆ saturated or unsaturated hydrocarbon chain.

[0408] In an embodiment, X is —CH(—R₆)—R₇, R₆ is —Cₚ—R₈, R₇ is —C_{p′}—R₈′, p and p′ are independently 0, 1, 2, 3 or 4; R₈ is a —C₈₋₂₀ hydrocarbon chain having one or two cis alkene groups at either or both of the omega 6 and 9 positions; and R₈′ is a —C₈₋₂₀ hydrocarbon chain having one or two cis alkene groups at either or both of the omega 6 and 9 positions.

[0409] In an embodiment, X is —CH(—R₆)—R₇, R₆ is —Cₚ—R₈, R₇ is —C_{p′}—R₈′, p and p′ are independently 0, 1, 2, 3 or 4; R₈ is a —C₈₋₂₀ hydrocarbon chain having one or two cis alkene groups at either or both of the omega 6 and 9 positions; and R₈′ is a —C₁₋₃—C(—O—C₆₋₁₂)—O—C₆₋₁₂ saturated or unsaturated hydrocarbon chain.

[0410] In an embodiment, X is —CH(—R₆)—R₇, R₆ is —Cₚ—R₈, R₇ is —C_{p′}—R₈′, p and p′ are independently 0, 1, 2, 3 or 4; R₈ is a —C₈₋₂₀ hydrocarbon chain having one or two cis alkene groups at either or both of the omega 6 and 9 positions; and R₈′ is a —C₆₋₁₆ saturated hydrocarbon chain.

[0411] In an embodiment, X is —CH(—R₆)—R₇, R₆ is —Cₚ—R₈, R₇ is —C_{p′}—R₈′, p and p′ are independently 0, 1, 2, 3 or 4; R₈ is a —C₈₋₂₀ hydrocarbon chain having one or two cis alkene groups at either or both of the omega 6 and 9 positions; and R₈′ is a —C(—C₆₋₁₆)—C₆₋₁₆ saturated or unsaturated hydrocarbon chain.

[0412] In an embodiment, X is —CH(—R₆)—R₇, R₆ is —Cₚ—R₈, R₇ is —C_{p′}—R₈′, p and p′ are independently 0, 1, 2, 3 or 4; R₈ is a —C₈₋₂₀ hydrocarbon chain having one or two cis alkene groups at either or both of the omega 6 and 9 positions; and R₈′ is a —C[—C—O—C(O)—C₄₋₁₂]—C—O—C(O)—C₄₋₁₂ saturated or unsaturated hydrocarbon chain.

[0413] In an embodiment, X is —CH(—R₆)—R₇, R₆ is —Cₚ—R₈, R₇ is —C_{p′}—R₈′, p and p′ are independently 0, 1, 2, 3 or 4; R₈ is a —C₈₋₂₀ hydrocarbon chain having one or two cis alkene groups at either or both of the omega 6 and 9 positions; and R₈′ is a —C₆₋₁₆ saturated or unsaturated hydrocarbon chain.

[0414] In an embodiment, X is —CH(—R₆)—R₇, R₆ is —Cₚ—R₈, R₇—C_{p′}—R₈′, p and p′ are independently 0, 1, 2, 3 or 4; R₈ is a-C₁₋₃—C(—O—C₆₋₁₂)—O—C₆₋₁₂ saturated or unsaturated hydrocarbon chain; and R₈′ is a —C₈₋₂₀ hydrocarbon chain having one or two cis alkene groups at either or both of the omega 6 and 9 positions.

[0415] In an embodiment, X is —CH(—R₆)—R₇, R₆ is —Cₚ—R₈, R₇ is —C_{p′}—R₈′, p and p′ are independently 0, 1, 2, 3 or 4; R₈ is —C₁₋₃—C(—O—C₆₋₁₂)—O—C₆₋₁₂ saturated or unsaturated hydrocarbon chain; and R₈′ is a —C₁₋₃—C(—O—C₆₋₁₂)—O—C₆₁₂ saturated or unsaturated hydrocarbon chain.

[0416] In an embodiment, X is —CH(—R₆)—R₇, R₆ is —Cₚ—R₈, R₇—C_{p′}—R₈′, p and p′ are independently 0, 1, 2, 3 or 4; R₈ is a-C₁₋₃—C(—O—C₆₋₁₂)—O—C₆₋₁₂ saturated or unsaturated hydrocarbon chain; and R₈′ is a —C₆₋₁₆ saturated hydrocarbon chain.

[0417] In an embodiment, X is —CH(—R₆)—R₇, R₆ is —Cₚ—R₈, R₇ is —C_{p′}—R₈′, p and p′ are independently 0, 1, 2, 3 or 4; R₈ is a-C₁₋₃—C(—O—C₆₋₁₂)—O—C₆₋₁₂ saturated or unsaturated hydrocarbon chain; and R₈′ is a —C(—C₆₋₁₆)—C₆₋₁₆ saturated or unsaturated hydrocarbon chain.

[0418] In an embodiment, X is —CH(—R₆)—R₇, R₆ is —Cₚ—R₈, R₇ is —C_{p′}—R₈′, p and p′ are independently 0, 1, 2, 3 or 4; R₈ is a-C₁₋₃—C(—O—C₆₋₁₂)—O—C₆₋₁₂ saturated or unsaturated hydrocarbon chain; and R₈′ is a —C[—C—O—C(O)—C₄₋₁₂]—C—O—C(O)—C₄₋₁₂ saturated or unsaturated hydrocarbon chain.

[0419] In an embodiment, X is —CH(—R₆)—R₇, R₆ is —Cₚ—R₈, R₇—C_{p′}—R₈′, p and p′ are independently 0, 1, 2, 3 or 4; R₈ is a-C₁₋₃—C(—O—C₆₋₁₂)—O—C₆₋₁₂ saturated or unsaturated hydrocarbon chain; and R₈′ is a —C₆₋₁₆ saturated or unsaturated hydrocarbon chain.

[0420] In an embodiment, X is —CH(—R₆)—R₇, R₆ is —Cₚ—R₈, R₇ is —C_{p′}—R₈′, p and p′ are independently 0, 1, 2, 3 or 4; R₈ is a —C₆₋₁₆ saturated hydrocarbon chain; and R₈′ is a —C₈₋₂₀ hydrocarbon chain having one or two cis alkene groups at either or both of the omega 6 and 9 positions.

[0421] In an embodiment, X is —CH(—R₆)—R₇, R₆ is —Cₚ—R₈, R₇ is —C_{p′}—R₈′, p and p′ are independently 0, 1, 2, 3 or 4; R₈ is a —C₆₋₁₆ saturated hydrocarbon chain; and R₈′ is a —C₁₋₃—C(—O—C₆₋₁₂)—O—C₆₋₁₂ saturated or unsaturated hydrocarbon chain.

[0422] In an embodiment, X is —CH(—R₆)—R₇, R₆ is —Cₚ—R₈, R₇ is —C_{p′}—R₈′, p and p′ are independently 0, 1, 2, 3 or 4; R₈ is a —C₆₋₁₆ saturated hydrocarbon chain; and R₈′ is a —C₆₋₁₆ saturated hydrocarbon chain.

[0423] In an embodiment, X is —CH(—R₆)—R₇, R₆ is —Cₚ—R₈, R₇ is —C_{p′}—R₈′, p and p′ are independently 0, 1, 2, 3 or 4; R₈ is a —C₆₋₁₆ saturated hydrocarbon chain; and R₈′ is a —C(—C₆₋₁₆)—C₆₋₁₆ saturated or unsaturated hydrocarbon chain.

[0424] In an embodiment, X is —CH(—R₆)—R₇, R₆ is —Cₚ—R₈, R₇ is —C_{p′}—R₈′, p and p′ are independently 0, 1, 2, 3 or 4; R₈ is a —C₆₋₁₆ saturated hydrocarbon chain; and R₈′ is a —C[—C—O—C(O)—C₄₋₁₂]—C—O—C(O)—C₄₋₁₂ saturated or unsaturated hydrocarbon chain.

[0425] In an embodiment, X is —CH(—R₆)—R₇, R₆ is —Cₚ—R₈, R₇ is —C_{p′}—R₈′, p and p′ are independently 0, 1, 2, 3 or 4; R₈ is a —C₆₋₁₆ saturated hydrocarbon chain; and R₈′ is a —C₆₋₁₆ saturated or unsaturated hydrocarbon chain.

[0426] In an embodiment, X is —CH(—R₆)—R₇, R₆ is —Cₚ—R₈, R₇ is —C_{p′}—R₈′, p and p′ are independently 0, 1, 2, 3 or 4; and R₈ is a —C(—C₆₋₁₆)—C₆₋₁₆ saturated or unsaturated hydrocarbon chain; and R₈′ is a —C₈₋₂₀ hydrocarbon chain having one or two cis alkene groups at either or both of the omega 6 and 9 positions.

[0427] In an embodiment, X is —CH(—R₆)—R₇, R₆ is —Cₚ—R₈, R₇ is —C_{p′}—R₈′, p and p′ are independently 0, 1, 2, 3 or 4; and R₈ is a —C(—C₆₋₁₆)—C₆₋₁₆ saturated or unsaturated hydrocarbon chain; and R₈′ is a —C. 3-C(—O—C₆₋₁₂)—O—C₆₋₁₂ saturated or unsaturated hydrocarbon chain.

[0428] In an embodiment, X is —CH(—R₆)—R₇, R₆ is —Cₚ—R₈, R₇ is —C_{p′}—R₈′, p and p′ are independently 0, 1, 2, 3 or 4; and R₈ is a —C(—C₆₋₁₆)—C₆₋₁₆ saturated or unsaturated hydrocarbon chain; and R₈′ is a —C₆₋₁₆ saturated hydrocarbon chain.

[0429] In an embodiment, X is —CH(—R₆)—R₇, R₆ is —Cₚ—R₈, R₇ is —C_{p′}—R₈′, p and p′ are independently 0, 1, 2, 3 or 4; and R₈ is a —C(—C₆₋₁₆)—C₆₋₁₆ saturated or unsaturated hydrocarbon chain; and R₈′ is a —C(—C₆₋₁₆)—C₆₋₁₆ saturated or unsaturated hydrocarbon chain.

[0430] In an embodiment, X is —CH(—R₆)—R₇, R₆ is —Cₚ—R₈, R₇ is —C_{p′}—R₈′, p and p′ are independently 0, 1, 2, 3 or 4; and R₈ is a —C(—C₆₋₁₆)—C₆₋₁₆ saturated or unsaturated hydrocarbon chain; and R₈′ is a —C[—C—O—C(O)—C₄₋₁₂]—C—O—C(O)—C₄₋₁₂ saturated or unsaturated hydrocarbon chain.

[0431] In an embodiment, X is —CH(—R₆)—R₇, R₆ is —Cₚ—R₈, R₇ is —C_{p′}—R₈′, p and p′ are independently 0, 1, 2, 3 or 4; and R₈ is a —C(—C₆₋₁₆)—C₆₋₁₆ saturated or unsaturated hydrocarbon chain; and R₈′ is a —C₆₋₁₆ saturated or unsaturated hydrocarbon chain.

[0432] In an embodiment, X is —CH(—R₆)—R₇, R₆ is —Cₚ—R₈, R₇ is —C_{p′}—R₈′, p and p′ are independently 0, 1, 2, 3 or 4; and R₈ is a —C[—C—O—C(O)—C₄₋₁₂]—C—O—C(O)—C₄₋₁₂ saturated or unsaturated hydrocarbon chain; and R₈′ is a —C₈₋₂₀ hydrocarbon chain having one or two cis alkene groups at either or both of the omega 6 and 9 positions.

[0433] In an embodiment, X is —CH(—R₆)—R₇, R₆ is —Cₚ—R₈, R₇—C_{p′}—R₈′, p and p′ are independently 0, 1, 2, 3 or 4; and R₈ is a —C[—C—O—C(O)—C₄₋₁₂]—C—O—C(O)—C₄₋₁₂ saturated or unsaturated hydrocarbon chain; and R₈′ is a —C₁₋₃—C(—O—C₆₋₁₂)—O—C₆₋₁₂ saturated or unsaturated hydrocarbon chain.

[0434] In an embodiment, X is —CH(—R₆)—R₇, R₆ is —Cₚ—R₈, R₇ is —C_{p′}—R₈′, p and p′ are independently 0, 1, 2, 3 or 4; and R₈ is a —C[—C—O—C(O)—C₄₋₁₂]—C—O—C(O)—C₄₋₁₂ saturated or unsaturated hydrocarbon chain; and R₈′ is a —C₆₋₁₆ saturated hydrocarbon chain.

[0435] In an embodiment, X is —CH(—R₆)—R₇, R₆ is —Cₚ—R₈, R₇ is —C_{p′}—R₈′, p and p′ are independently 0, 1, 2, 3 or 4; and R₈ is a —C[—C—O—C(O)—C₄₋₁₂]—C—O—C(O)—C₄₋₁₂ saturated or unsaturated hydrocarbon chain; and R₈′ is a —C(—C₆₋₁₆)—C₆₋₁₆ saturated or unsaturated hydrocarbon chain.

[0436] In an embodiment, X is —CH(—R₆)—R₇, R₆ is —Cₚ—R₈, R₇ is —C_{p′}—R₈′, p and p′ are independently 0, 1, 2, 3 or 4; and R₈ is a —C[—C—O—C(O)—C₄₋₁₂]—C—O—C(O)—C₄₋₁₂ saturated or unsaturated hydrocarbon chain; and R₈′ is a —C[—C—O—C(O)—C₄₋₁₂]—C—O—C(O)—C₄₋₁₂ saturated or unsaturated hydrocarbon chain.

[0437] In an embodiment, X is —CH(—R₆)—R₇, R₆ is —Cₚ—R₈, R₇—C_{p′}—R₈′, p and p′ are independently 0, 1, 2, 3 or 4; and R₈ is a —C[—C—O—C(O)—C₄₋₁₂]—C—O—C(O)—C₄₋₁₂ saturated or unsaturated hydrocarbon chain; and R₈′ is a —C₆₋₁₆ saturated or unsaturated hydrocarbon chain.

[0438] In an embodiment, X is —CH(—R₆)—R₇, R₆ is —Cₚ—R₈, R₇ is —C_{p′}—R₈′, p and p′ are independently 0, 1, 2, 3 or 4; and R₈ is a —C₆₋₁₆ saturated or unsaturated hydrocarbon chain; and R₈′ is a —C₈₋₂₀ hydrocarbon chain having one or two cis alkene groups at either or both of the omega 6 and 9 positions.

[0439] In an embodiment, X is —CH(—R₆)—R₇, R₆ is —Cₚ—R₈, R₇ is —C_{p′}—R₈′, p and p′ are independently 0, 1, 2, 3 or 4; and R₈ is a —C₆₋₁₆ saturated or unsaturated hydrocarbon chain; and R₈′ is a —C₁₋₃—C(—O—C₆₋₁₂)—O—C₆₋₁₂ saturated or unsaturated hydrocarbon chain.

[0440] In an embodiment, X is —CH(—R₆)—R₇, R₆ is —Cₚ—R₈, R₇—C_{p′}—R₈′, p and p′ are independently 0, 1, 2, 3 or 4; and R₈ is a —C₆₋₁₆ saturated or unsaturated hydrocarbon chain; and R₈′ is a —C₆₋₁₆ saturated hydrocarbon chain.

[0441] In an embodiment, X is —CH(—R₆)—R₇, R₆ is —Cₚ—R₈, R₇ is —C_{p′}—R₈′, p and p′ are independently 0, 1, 2, 3 or 4; and R₈ is a —C₆₋₁₆ saturated or unsaturated hydrocarbon chain; and R₈′ is a —C(—C₆₋₁₆)—C₆₋₁₆ saturated or unsaturated hydrocarbon chain.

[0442] In an embodiment, X is —CH(—R₆)—R₇, R₆ is —Cₚ—R₈, R₇ is —C_{p′}—R₈″, p and p′ are independently 0, 1, 2, 3 or 4; and R₈ is a —C₆₋₁₆ saturated or unsaturated hydrocarbon chain; and R₈′ is a —C[—C—O—C(O)—C₄₋₁₂]—C—O—C(O)—C₄₋₁₂ saturated or unsaturated hydrocarbon chain.

[0443] In an embodiment, X is —CH(—R₆)—R₇, R₆ is —Cₚ—R₈, R₇ is —C_{p′}—R₈′, p and p′ are independently 0, 1, 2, 3 or 4; and R₈ is a —C₆₋₁₆ saturated or unsaturated hydrocarbon chain; and R₈′ is a —C₆₋₁₆ saturated or unsaturated hydrocarbon chain.

[0444] In some embodiments, the cation-ionizable lipid comprises a cationic lipid from WO2012/006376, WO2012/030901, WO2012/031046, WO2012/031043, WO2012/006378, WO2011/076807, WO2013/033563, WO2013/006825, WO2014/136086, WO2015/095340, WO2015/095346, WO2016/037053, WO2017/075531, WO2018/081480, WO2015/074085, WO2018/1703322, U.S. Patent Application Publication Nos.: 20220081392, 20220072155, 20220040285, 20210395188, 20210251898, 20210128488, 20210122703, 20210122702, 20210107861, 20200283372, 20200172472, 20200163878, 20200121809, 20200046838, 20190359556, 20190314524, 20190274968, 20190270697, 20190022247, 20180185516, 20170283367, 20170157268, 20170119904, 20160376224, 20160317676, or 20150376115, U.S. Application Nos. 61/905,724 or Ser. No. 15/614,499, or U.S. Pat. Nos. 8,802,863, 9,458,090, 9,593,077, 9,567,296, 9,604,908, 9,643,916, 9,669,097, 9,670,487, 9,737,619, 9,738,593, 9,725,720, 9,796,977,10,106,490, 10,166,298, 10,221,127, 10,723,692, 11,040,112, 11,168,051, 11,246,933, or 11,285,222 (called ionizable lipids therein).

[0445] In some embodiments, the cation-ionizable lipid comprises a first group and two biodegradable hydrophobic tails. In some embodiments, the first group comprises a central moiety and a head group, wherein the first group is capable of being positively charged. In some embodiments, the central moiety is directly bonded to each of the two biodegradable groups. In some embodiments, the central moiety is directly bonded to the head group. In some embodiments, the central moiety is selected from a central carbon atom, a central nitrogen atom, a central heteroaryl group, and a central heterocyclic group. In some embodiments, one of the two biodegradable hydrophobic tails, or each of the two biodegradable hydrophobic tails, has the formula of: -(a C₁-C₁₂ alkyl, a C₁-C₁₂ alkylene, or a C₁-C₁₂ alkenylene)-(the biodegradable group)-(a C₆-C₂₄ alkyl, a C₆-C₂₄ alkylene, a C₇-C₂₃ alkyl, a C₇-C₂₃ alkylene, a C₈-C₂₂ alkyl, a C₈-C₂₂ alkylene, a C₉-C₂₁ alkyl, a C₉-C₂₁ alkylene, a C₁₀-C₂₀ alkyl, a C₁₀-C₂₀ alkylene, a C₁₁-C₁₉ alkyl, a C₁₁-C₁₉ alkylene, a C₁₂-C₁₈alkyl, a C₁₂-C₁₈ alkylene, a C₁₃-C₁₇ alkyl, a C₁₃-C₁₇ alkylene). In some embodiments, the each biodegradable group in the two biodegradable hydrophobic tails is independently selected from: —O(C=O)—, —(C=O)O—, —C(═O)—, —O—, —S(O)x-, —S—S—, —C(═O)S—, SC(═O)—, —NR^{a}C(═O)—, —C(═O)NR^{a}—, NR^{a}C(═O)NR^{a}—, —OC(═O)NR^{a}—, or —NR^{a}C(═O)O—; wherein X is 0, 1, or 2, and wherein R^{a} is a hydrogen or a C₁-C₁₂ alkyl. In some embodiments, in one of the two biodegradable tails, or each of the two biodegradable tails: 1) has a terminal hydrophobic chain, which is a branched alkyl group, and a terminus, 2) the branching of the branched alkyl group has an alpha-position relative to the biodegradable group, 3) 6 to 12 carbon atoms of the biodegradable hydrophobic tail separate the terminus from the biodegradable group.

[0446] In some embodiments, the cation-ionizable lipid comprises bis(2-methacryloyl)oxyethyl disulfide (DSDMA, CAS No. 36837-97-5), N,N-dioleyl-N,N-dimethylammonium chloride (DODAC), N,N-distearyl-N,N-dimethylammonium bromide (DDAB), N,N-dimethyl-2,3-dioleyloxy)propylamine (DODMA), ckk-E12, ckk, 1,2-DiLinoleyloxy-N,N-dimethylaminopropane (DLinDMA), 1,2-Dilinolenyloxy-N, N-dimethylaminopropane (DLenDMA), 1,2-di-y-linolenyloxy-N,N-dimethylaminopropane (y-DLenDMA), 98N12-5, 1,2-Dilinoleylcarbamoyloxy-3-dimethylaminopropane (DLin-C-DAP), 1,2-Dilinoleyoxy-3-(dimethylamino)acetoxypropane (DLin-DAC), 1,2-Dilinoleyoxy-3-morpholinopropane (DLin-MA), 1,2-Dilinoleoyl-3-dimethylaminopropane (DLinDAP), 1,2-Dilinoleylthio-3-dimethylaminopropane (DLin-S-DMA), 1-Linoleoyl-2-linoleyloxy-3-dimethylaminopropane (DLin-2-DMAP), 1,2-Dilinoleyloxy-3-trimethylaminopropane chloride salt (DLin-TMA.Cl), ICE (Imidazol-based), HGT5000, HGT5001, DMDMA, CLinDMA, CpLinDMA, DMOBA, DOcarbDAP, DLincarbDAP, DLinCDAP, KLin-K-DMA, DLin-K-XTC2-DMA, XTC (2,2-Dilinoleyl-4-dimethylaminoethyl-[1,3]-dioxolane) HGT4003, 1,2-Dilinoleoyl-3-trimethylaminopropane chloride salt (DLin-TAP.Cl), 1,2-Dilinoleyloxy-3-(N-methylpiperazino)propane (DLin-MPZ), or 3-(N,N-Dilinoleylamino)-1,2-propanediol (DLinAP), 3-(N,N-Dioleylamino)-1,2-propanedio (DOAP), 1,2-Dilinoleyloxo-3-(2-N,N-dimethylamino)ethoxypropane (DLin-EG-DMA), 2,2-Dilinoleyl-4-dimethylaminomethyl-[1,3]-dioxolane (DLin-K-DMA) or analogs thereof, (3aR,5s,6aS)—N,N-dimethyl-2,2-di((9Z,12Z)-octadeca-9,12-dienyl)tetrahydro-3aH-cyclopenta[d][1,3]dioxol-5-amine, (6Z,9Z,28Z,31Z)-heptatriaconta-6,9,28,31-tetraen-19-yl-4-(dimethylamino)b-utanoate (MC3), ALNY-100 ((3aR,5s,6aS)—N,N-dimethyl-2,2-di((9Z,12Z)-octadeca-9,12-dienyl)tetrahydr-o-3aH-cyclopenta[d][1,3]dioxol-5-amine)), 1,1′-(2-(4-(2-((2-(bis(2-hydroxydodecyl)amino)ethyl)(2-hydroxydodecyl)amino)ethyl)piperazin-1-yl)ethylazanediyl)didodecan-2-ol (C12-200), 2,2-dilinoleyl-4-(2-dimethylaminoethyl)[1,3]-dioxolane (DLin-K-C2-DMA), 2,2-dilinoleyl-4-dimethylaminomethyl-[1,3]-dioxolane (DLin-K-DMA), NC98-5 (4,7, 13-tris(3-oxo-3-(undecylamino)propyl)-N1,N 16-diundecyl-4,7, 10,13-tetraazahexadecane-1,16-diamide), (6Z,9Z,28Z,31Z)-heptatriaconta-6,9,28,31-tetraen-19-yl 4-(dimethylamino) butanoate (DLin-M-C3-DMA), 3-((6Z,9Z,28Z,31Z)-heptatriaconta-6,9,28,31-tetraen-19-yloxy)-N,N-dimethy- lpropan-1-amine (MC3 Ether), 4-((6Z,9Z,28Z,31Z)-heptatriaconta-6,9,28,31-tetraen-1, 9-yloxy)-N,N-dimethy-lbutan-1-amine (MC4 Ether), LIPOFECTIN® (commercially available cationic liposomes comprising DOTMA and 1,2-dioleoyl-sn-3phosphoethanolamine (DOPE), from GIBCO/BRL, Grand Island, N.Y.); LIPOFECTAMINE® (commercially available cationic liposomes comprising N-(1-(2,3dioleyloxy)propyl)-N-(2-(sperminecarboxamido)ethyl)-N,N-dimethyl-ammonium trifluoroacetate (DOSPA), (DOPE), from GIBCO/BRL); or TRANSFECTAM® (commercially available cationic lipids comprising dioctadecylamidoglycyl carboxyspermine (DOGS) in ethanol from Promega Corp., Madison, Wis.) or any combination of any of the foregoing. Further suitable cationic include those described in international patent publications WO2010/053572 (and particularly, CI 2-200 described at paragraph [00225]) and WO2012/170930, both of which are incorporated herein by reference, HGT4003, HGT5000, HGTS001, HGT5001, HGT5002 (see US Patent Application Publication No. 20150140070A1).

[0447] Representative cation-ionizable lipids include, but are not limited to, 1,2-dilinoleyoxy-3-(dimethylamino)acetoxypropane (DLin-DAC), 1,2-dilinoleyoxy-3morpholinopropane (DLin-MA), 1,2-dilinoleoyl-3-dimethylaminopropane (DLinDAP), 1,2-dilinoleylthio-3-dimethylaminopropane (DLin-S-DMA), 1-linoleoyl-2-linoleyloxy-3dimethylaminopropane (DLin-2-DMAP), 1,2-dilinoleyloxy-3-trimethylaminopropane chloride salt (DLin-TMA.Cl), 1,2-dilinoleoyl-3-trimethylaminopropane chloride salt (DLin-TAP.Cl), 1,2-dilinoleyloxy-3-(N-methylpiperazino)propane (DLin-MPZ), 3-(N,Ndilinoleylamino)-1,2-propanediol (DLinAP), 3-(N,N-dioleylamino)-1,2-propanediol (DOAP), 1,2-dilinoleyloxo-3-(2-N,N-dimethylamino)ethoxypropane (DLin-EG-DMA), and 2,2-dilinoleyl-4-dimethylaminomethyl[1,3]-dioxolane (DLin-K-DMA), 2,2-dilinoleyl-4-(2-dimethylaminoethyl)[1,3]-dioxolane (DLin-KC2-DMA); dilinoleyl-methyl-4-dimethylaminobutyrate (DLin-MC3-DMA); MC3 (US Patent Publication No. 20100324120).

[0448] In some embodiments, the LNP can comprise multilamellar vesicles (MLV); small uniflagellar vesicles (SUV); or large unilamellar vesicles (LUV). MLVs have multiple bilayers in each vesicle, forming several separate aqueous compartments. SUVs and LUVs have a single bilayer encapsulating an aqueous core. For compositions comprising LNPs with different diameters, in some embodiments: (i) at least 80% by number should have diameters in the range of 20-220 nm, (ii) the average (median) diameter (Zav, by intensity) of the population is ideally in the range of 40-200 nm, or (iii) the diameters should have a polydispersity index <0.2.

[0449] Various amphiphilic lipids can form bilayers in an aqueous environment to encapsulate a RNA-containing aqueous core as a LNP. These lipids can have an anionic, cationic, or zwitterionic hydrophilic head group. Some phospholipids are anionic whereas other are zwitterionic and others are cationic. Suitable classes of phospholipid include, but are not limited to, phosphatidylethanolamines, phosphatidylcholines, phosphatidylserines, and phosphatidyl-glycerols, and some useful phospholipids are listed in Table 1. Useful cationic lipids include, but are not limited to, dioleoyl trimethylammonium propane (DOTAP), 1,2-distearyloxy-N,N-dimethyl-3-aminopropane (DSDMA), 1,2-dioleyloxy-N,Ndimethyl-3-aminopropane (DODMA), 1,2-dilinoleyloxy-N,N-dimethyl-3-aminopropane (DLinDMA), and 1,2-dilinolenyloxy-N,N-dimethyl-3-aminopropane (DLenDMA). Zwitterionic lipids include, but are not limited to, acyl zwitterionic lipids and ether zwitterionic lipids. Examples of useful zwitterionic lipids are 1,2-dipalmitoyl-sn-glycero-3-phosphocholine (DPPC), 1,2-dioleoyl-sn-glycero-3-phosphocholine (DOPC), and dodecylphosphocholine. The lipids can be saturated or unsaturated. The use of at least one unsaturated lipid for preparing liposomes is preferred. If an unsaturated lipid has two tails, both tails can be unsaturated, or it can have one saturated tail and one unsaturated tail.

[0450] Other useful LNPs are described in the following references: WO2012/006376; WO2012/030901; WO2012/031046; WO2012/031043; WO2012/006378; WO2011/076807; WO2013/033563; WO2013/006825; WO2014/136086; WO2015/095340; WO2015/095346; WO2016/037053. In some embodiments, the LNPs are RV01 liposomes, see the following references: WO2012/006376 and Geall et al. (2012) PNAS USA. September 4; 109(36): 14604-9.

### Polyethylene Glycol-Conjugated Lipids

[0451] In some embodiments, the LNP comprises a polyethylene glycol-conjugated (PEG-conjugated) lipid. In some embodiments, the PEG-conjugated lipid comprises a polyethylene glycol (PEG) having various lengths and molecular weights. In some embodiments, 80% of the PEGs in the PEG-conjugated lipids have a molecular weight from: 0.5 kDa, 0.6 kDa, 0.7 kDa, 0.8 kDa, 0.9 kDa, 1.0 kDa, 1.1 kDa, 1.2 kDa, 1.3 kDa, 1.4 kDa, 1.5 kDa, 1.6 kDa, 1.7 kDa, 1.8 kDa, 1.9 kDa, 2.0 kDa, 2.1 kDa, 2.2 kDa, 2.3 kDa, 2.4 kDa, 2.5 kDa, 2.6 kDa, 2.7 kDa, 2.8 kDa, 2.9 kDa, 3.0 kDa, 3.1 kDa, 3.2 kDa, 3.3 kDa, or 3.4 kDa. In some embodiments, 80% of the PEGs in the PEG-conjugated lipids have a molecular weight to: 8 kDa, 7.9 kDa, 7.8 kDa, 7.7 kDa, 7.6 kDa, 7.5 kDa, 7.4 kDa, 7.3 kDa, 7.2 kDa, 7.1 kDa, 7 kDa, 6.9 kDa, 6.8 kDa, 6.7 kDa, 6.6 kDa, 6.5 kDa, 6.4 kDa, 6.3 kDa, 6.2 kDa, 6.1 kDa, 6 kDa, 5.9 kDa, 5.8 kDa, 5.7 kDa, 5.6 kDa, 5.5 kDa, 5.4 kDa, 5.3 kDa, 5.2 kDa, 5.1 kDa, 5 kDa, 4.9 kDa, 4.8 kDa, 4.7 kDa, 4.6 kDa, 4.5 kDa, 4.4 kDa, 4.3 kDa, 4.2 kDa, 4.1 kDa, 4 kDa, 3.9 kDa, 3.8 kDa, 3.7 kDa, 3.6 kDa, 3.5 kDa, 3.4 kDa, 3.3 kDa, 3.2 kDa, 3.1 kDa, 3 kDa, 2.9 kDa, 2.8 kDa, 2.7 kDa, 2.6 kDa, 2.5 kDa, 2.4 kDa, 2.3 kDa, 2.2 kDa, 2.1 kDa, 2 kDa, 1.9 kDa, 1.8 kDa, 1.7 kDa, 1.6 kDa, 1.5 kDa, 1.4 kDa, 1.3 kDa, 1.2 kDa, or 1.1 kDa. In some embodiments, 80% of the PEGs in the PEG-conjugated lipids have a molecular weight from 0.5 kDa to: 0.6 kDa, 0.7 kDa, 0.8 kDa, 0.9 kDa, 1.0 kDa, 1.1 kDa, 1.2 kDa, 1.3 kDa, 1.4 kDa, 1.5 kDa, 1.6 kDa, 1.7 kDa, 1.8 kDa, 1.9 kDa, 2.0 kDa, 2.1 kDa, 2.2 kDa, 2.3 kDa, 2.4 kDa, 2.5 kDa, 2.6 kDa, 2.7 kDa, 2.8 kDa, 2.9 kDa, 3.0 kDa, 3.1 kDa, 3.2 kDa, 3.3 kDa, or 3.4 kDa; from 0.6 kDa to: 0.7 kDa, 0.8 kDa, 0.9 kDa, 1.0 kDa, 1.1 kDa, 1.2 kDa, 1.3 kDa, 1.4 kDa, 1.5 kDa, 1.6 kDa, 1.7 kDa, 1.8 kDa, 1.9 kDa, 2.0 kDa, 2.1 kDa, 2.2 kDa, 2.3 kDa, 2.4 kDa, 2.5 kDa, 2.6 kDa, 2.7 kDa, 2.8 kDa, 2.9 kDa, 3.0 kDa, 3.1 kDa, 3.2 kDa, 3.3 kDa, or 3.4 kDa; from 0.7 kDa to: 0.8 kDa, 0.9 kDa, 1.0 kDa, 1.1 kDa, 1.2 kDa, 1.3 kDa, 1.4 kDa, 1.5 kDa, 1.6 kDa, 1.7 kDa, 1.8 kDa, 1.9 kDa, 2.0 kDa, 2.1 kDa, 2.2 kDa, 2.3 kDa, 2.4 kDa, 2.5 kDa, 2.6 kDa, 2.7 kDa, 2.8 kDa, 2.9 kDa, 3.0 kDa, 3.1 kDa, 3.2 kDa, 3.3 kDa, or 3.4 kDa; from 0.8 kDa to: 0.9 kDa, 1.0 kDa, 1.1 kDa, 1.2 kDa, 1.3 kDa, 1.4 kDa, 1.5 kDa, 1.6 kDa, 1.7 kDa, 1.8 kDa, 1.9 kDa, 2.0 kDa, 2.1 kDa, 2.2 kDa, 2.3 kDa, 2.4 kDa, 2.5 kDa, 2.6 kDa, 2.7 kDa, 2.8 kDa, 2.9 kDa, 3.0 kDa, 3.1 kDa, 3.2 kDa, 3.3 kDa, or 3.4 kDa; from 0.9 kDa to: 0.0 kDa, 1.1 kDa, 1.2 kDa, 1.3 kDa, 1.4 kDa, 1.5 kDa, 1.6 kDa, 1.7 kDa, 1.8 kDa, 1.9 kDa, 2.0 kDa, 2.1 kDa, 2.2 kDa, 2.3 kDa, 2.4 kDa, 2.5 kDa, 2.6 kDa, 2.7 kDa, 2.8 kDa, 2.9 kDa, 3.0 kDa, 3.1 kDa, 3.2 kDa, 3.3 kDa, or 3.4 kDa; from 1.0 kDa to: 1.1 kDa, 1.2 kDa, 1.3 kDa, 1.4 kDa, 1.5 kDa, 1.6 kDa, 1.7 kDa, 1.8 kDa, 1.9 kDa, 2.0 kDa, 2.1 kDa, 2.2 kDa, 2.3 kDa, 2.4 kDa, 2.5 kDa, 2.6 kDa, 2.7 kDa, 2.8 kDa, 2.9 kDa, 3.0 kDa, 3.1 kDa, 3.2 kDa, 3.3 kDa, or 3.4 kDa; from 1.1 kDa to: 1.2 kDa, 1.3 kDa, 1.4 kDa, 1.5 kDa, 1.6 kDa, 1.7 kDa, 1.8 kDa, 1.9 kDa, 2.0 kDa, 2.1 kDa, 2.2 kDa, 2.3 kDa, 2.4 kDa, 2.5 kDa, 2.6 kDa, 2.7 kDa, 2.8 kDa, 2.9 kDa, 3.0 kDa, 3.1 kDa, 3.2 kDa, 3.3 kDa, or 3.4 kDa; from 1.2 kDa to: 1.3 kDa, 1.4 kDa, 1.5 kDa, 1.6 kDa, 1.7 kDa, 1.8 kDa, 1.9 kDa, 2.0 kDa, 2.1 kDa, 2.2 kDa, 2.3 kDa, 2.4 kDa, 2.5 kDa, 2.6 kDa, 2.7 kDa, 2.8 kDa, 2.9 kDa, 3.0 kDa, 3.1 kDa, 3.2 kDa, 3.3 kDa, or 3.4 kDa; from 1.3 kDa to: 1.4 kDa, 1.5 kDa, 1.6 kDa, 1.7 kDa, 1.8 kDa, 1.9 kDa, 2.0 kDa, 2.1 kDa, 2.2 kDa, 2.3 kDa, 2.4 kDa, 2.5 kDa, 2.6 kDa, 2.7 kDa, 2.8 kDa, 2.9 kDa, 3.0 kDa, 3.1 kDa, 3.2 kDa, 3.3 kDa, or 3.4 kDa; from 1.4 kDa to: 1.5 kDa, 1.6 kDa, 1.7 kDa, 1.8 kDa, 1.9 kDa, 2.0 kDa, 2.1 kDa, 2.2 kDa, 2.3 kDa, 2.4 kDa, 2.5 kDa, 2.6 kDa, 2.7 kDa, 2.8 kDa, 2.9 kDa, 3.0 kDa, 3.1 kDa, 3.2 kDa, 3.3 kDa, or 3.4 kDa; from 1.5 kDa to: 1.6 kDa, 1.7 kDa, 1.8 kDa, 1.9 kDa, 2.0 kDa, 2.1 kDa, 2.2 kDa, 2.3 kDa, 2.4 kDa, 2.5 kDa, 2.6 kDa, 2.7 kDa, 2.8 kDa, 2.9 kDa, 3.0 kDa, 3.1 kDa, 3.2 kDa, 3.3 kDa, or 3.4 kDa; from 1.6 kDa to: 1.7 kDa, 1.8 kDa, 1.9 kDa, 2.0 kDa, 2.1 kDa, 2.2 kDa, 2.3 kDa, 2.4 kDa, 2.5 kDa, 2.6 kDa, 2.7 kDa, 2.8 kDa, 2.9 kDa, 3.0 kDa, 3.1 kDa, 3.2 kDa, 3.3 kDa, or 3.4 kDa; from 1.7 kDa to: 1.8 kDa, 1.9 kDa, 2.0 kDa, 2.1 kDa, 2.2 kDa, 2.3 kDa, 2.4 kDa, 2.5 kDa, 2.6 kDa, 2.7 kDa, 2.8 kDa, 2.9 kDa, 3.0 kDa, 3.1 kDa, 3.2 kDa, 3.3 kDa, or 3.4 kDa; from 1.8 kDa to: 1.9 kDa, 2.0 kDa, 2.1 kDa, 2.2 kDa, 2.3 kDa, 2.4 kDa, 2.5 kDa, 2.6 kDa, 2.7 kDa, 2.8 kDa, 2.9 kDa, 3.0 kDa, 3.1 kDa, 3.2 kDa, 3.3 kDa, or 3.4 kDa; from 1.9 kDa to: 2.0 kDa, 2.1 kDa, 2.2 kDa, 2.3 kDa, 2.4 kDa, 2.5 kDa, 2.6 kDa, 2.7 kDa, 2.8 kDa, 2.9 kDa, 3.0 kDa, 3.1 kDa, 3.2 kDa, 3.3 kDa, or 3.4 kDa; from 2.0 kDa to: 2.1 kDa, 2.2 kDa, 2.3 kDa, 2.4 kDa, 2.5 kDa, 2.6 kDa, 2.7 kDa, 2.8 kDa, 2.9 kDa, 3.0 kDa, 3.1 kDa, 3.2 kDa, 3.3 kDa, or 3.4 kDa; from 2.1 kDa to: 2.2 kDa, 2.3 kDa, 2.4 kDa, 2.5 kDa, 2.6 kDa, 2.7 kDa, 2.8 kDa, 2.9 kDa, 3.0 kDa, 3.1 kDa, 3.2 kDa, 3.3 kDa, or 3.4 kDa; from 2.2 kDa to: 2.3 kDa, 2.4 kDa, 2.5 kDa, 2.6 kDa, 2.7 kDa, 2.8 kDa, 2.9 kDa, 3.0 kDa, 3.1 kDa, 3.2 kDa, 3.3 kDa, or 3.4 kDa; from 2.3 kDa to: 2.4 kDa, 2.5 kDa, 2.6 kDa, 2.7 kDa, 2.8 kDa, 2.9 kDa, 3.0 kDa, 3.1 kDa, 3.2 kDa, 3.3 kDa, or 3.4 kDa; from 2.5 to: 2.6 kDa, 2.7 kDa, 2.8 kDa, 2.9 kDa, 3.0 kDa, 3.1 kDa, 3.2 kDa, 3.3 kDa, or 3.4 kDa; from 2.6 kDa to: 2.7 kDa, 2.8 kDa, 2.9 kDa, 3.0 kDa, 3.1 kDa, 3.2 kDa, 3.3 kDa, or 3.4 kDa; from 2.7 kDa to: 2.8 kDa, 2.9 kDa, 3.0 kDa, 3.1 kDa, 3.2 kDa, 3.3 kDa, or 3.4 kDa; from 2.8 kDa to: 2.9 kDa, 3.0 kDa, 3.1 kDa, 3.2 kDa, 3.3 kDa, or 3.4 kDa; from 2.9 kDa to: 3.0 kDa, 3.1 kDa, 3.2 kDa, 3.3 kDa, or 3.4 kDa; or from 3.0 kDa to: 3.1 kDa, 3.2 kDa, 3.3 kDa, or 3.4 kDa.

[0452] In some embodiments, the PEGs in the PEG-conjugated lipids have a molecular weight from: 0.5 kDa, 0.6 kDa, 0.7 kDa, 0.8 kDa, 0.9 kDa, 1.0 kDa, 1.1 kDa, 1.2 kDa, 1.3 kDa, 1.4 kDa, 1.5 kDa, 1.6 kDa, 1.7 kDa, 1.8 kDa, 1.9 kDa, 2.0 kDa, 2.1 kDa, 2.2 kDa, 2.3 kDa, 2.4 kDa, 2.5 kDa, 2.6 kDa, 2.7 kDa, 2.8 kDa, 2.9 kDa, 3.0 kDa, 3.1 kDa, 3.2 kDa, 3.3 kDa, or 3.4 kDa. In some embodiments, the PEGs in the PEG-conjugated lipids have a molecular weight to: 8 kDa, 7.9 kDa, 7.8 kDa, 7.7 kDa, 7.6 kDa, 7.5 kDa, 7.4 kDa, 7.3 kDa, 7.2 kDa, 7.1 kDa, 7 kDa, 6.9 kDa, 6.8 kDa, 6.7 kDa, 6.6 kDa, 6.5 kDa, 6.4 kDa, 6.3 kDa, 6.2 kDa, 6.1 kDa, 6 kDa, 5.9 kDa, 5.8 kDa, 5.7 kDa, 5.6 kDa, 5.5 kDa, 5.4 kDa, 5.3 kDa, 5.2 kDa, 5.1 kDa, 5 kDa, 4.9 kDa, 4.8 kDa, 4.7 kDa, 4.6 kDa, 4.5 kDa, 4.4 kDa, 4.3 kDa, 4.2 kDa, 4.1 kDa, 4 kDa, 3.9 kDa, 3.8 kDa, 3.7 kDa, 3.6 kDa, 3.5 kDa, 3.4 kDa, 3.3 kDa, 3.2 kDa, 3.1 kDa, 3 kDa, 2.9 kDa, 2.8 kDa, 2.7 kDa, 2.6 kDa, 2.5 kDa, 2.4 kDa, 2.3 kDa, 2.2 kDa, 2.1 kDa, 2 kDa, 1.9 kDa, 1.8 kDa, 1.7 kDa, 1.6 kDa, 1.5 kDa, 1.4 kDa, 1.3 kDa, 1.2 kDa, or 1.1 kDa. In some embodiments, the PEGs in the PEG-conjugated lipids have a molecular weight from 0.5 kDa to: 0.6 kDa, 0.7 kDa, 0.8 kDa, 0.9 kDa, 1.0 kDa, 1.1 kDa, 1.2 kDa, 1.3 kDa, 1.4 kDa, 1.5 kDa, 1.6 kDa, 1.7 kDa, 1.8 kDa, 1.9 kDa, 2.0 kDa, 2.1 kDa, 2.2 kDa, 2.3 kDa, 2.4 kDa, 2.5 kDa, 2.6 kDa, 2.7 kDa, 2.8 kDa, 2.9 kDa, 3.0 kDa, 3.1 kDa, 3.2 kDa, 3.3 kDa, or 3.4 kDa; from 0.6 kDa to: 0.7 kDa, 0.8 kDa, 0.9 kDa, 1.0 kDa, 1.1 kDa, 1.2 kDa, 1.3 kDa, 1.4 kDa, 1.5 kDa, 1.6 kDa, 1.7 kDa, 1.8 kDa, 1.9 kDa, 2.0 kDa, 2.1 kDa, 2.2 kDa, 2.3 kDa, 2.4 kDa, 2.5 kDa, 2.6 kDa, 2.7 kDa, 2.8 kDa, 2.9 kDa, 3.0 kDa, 3.1 kDa, 3.2 kDa, 3.3 kDa, or 3.4 kDa; from 0.7 kDa to: 0.8 kDa, 0.9 kDa, 1.0 kDa, 1.1 kDa, 1.2 kDa, 1.3 kDa, 1.4 kDa, 1.5 kDa, 1.6 kDa, 1.7 kDa, 1.8 kDa, 1.9 kDa, 2.0 kDa, 2.1 kDa, 2.2 kDa, 2.3 kDa, 2.4 kDa, 2.5 kDa, 2.6 kDa, 2.7 kDa, 2.8 kDa, 2.9 kDa, 3.0 kDa, 3.1 kDa, 3.2 kDa, 3.3 kDa, or 3.4 kDa; from 0.8 kDa to: 0.9 kDa, 1.0 kDa, 1.1 kDa, 1.2 kDa, 1.3 kDa, 1.4 kDa, 1.5 kDa, 1.6 kDa, 1.7 kDa, 1.8 kDa, 1.9 kDa, 2.0 kDa, 2.1 kDa, 2.2 kDa, 2.3 kDa, 2.4 kDa, 2.5 kDa, 2.6 kDa, 2.7 kDa, 2.8 kDa, 2.9 kDa, 3.0 kDa, 3.1 kDa, 3.2 kDa, 3.3 kDa, or 3.4 kDa; from 0.9 kDa to: 0.0 kDa, 1.1 kDa, 1.2 kDa, 1.3 kDa, 1.4 kDa, 1.5 kDa, 1.6 kDa, 1.7 kDa, 1.8 kDa, 1.9 kDa, 2.0 kDa, 2.1 kDa, 2.2 kDa, 2.3 kDa, 2.4 kDa, 2.5 kDa, 2.6 kDa, 2.7 kDa, 2.8 kDa, 2.9 kDa, 3.0 kDa, 3.1 kDa, 3.2 kDa, 3.3 kDa, or 3.4 kDa; from 1.0 kDa to: 1.1 kDa, 1.2 kDa, 1.3 kDa, 1.4 kDa, 1.5 kDa, 1.6 kDa, 1.7 kDa, 1.8 kDa, 1.9 kDa, 2.0 kDa, 2.1 kDa, 2.2 kDa, 2.3 kDa, 2.4 kDa, 2.5 kDa, 2.6 kDa, 2.7 kDa, 2.8 kDa, 2.9 kDa, 3.0 kDa, 3.1 kDa, 3.2 kDa, 3.3 kDa, or 3.4 kDa; from 1.1 kDa to: 1.2 kDa, 1.3 kDa, 1.4 kDa, 1.5 kDa, 1.6 kDa, 1.7 kDa, 1.8 kDa, 1.9 kDa, 2.0 kDa, 2.1 kDa, 2.2 kDa, 2.3 kDa, 2.4 kDa, 2.5 kDa, 2.6 kDa, 2.7 kDa, 2.8 kDa, 2.9 kDa, 3.0 kDa, 3.1 kDa, 3.2 kDa, 3.3 kDa, or 3.4 kDa; from 1.2 kDa to: 1.3 kDa, 1.4 kDa, 1.5 kDa, 1.6 kDa, 1.7 kDa, 1.8 kDa, 1.9 kDa, 2.0 kDa, 2.1 kDa, 2.2 kDa, 2.3 kDa, 2.4 kDa, 2.5 kDa, 2.6 kDa, 2.7 kDa, 2.8 kDa, 2.9 kDa, 3.0 kDa, 3.1 kDa, 3.2 kDa, 3.3 kDa, or 3.4 kDa; from 1.3 kDa to: 1.4 kDa, 1.5 kDa, 1.6 kDa, 1.7 kDa, 1.8 kDa, 1.9 kDa, 2.0 kDa, 2.1 kDa, 2.2 kDa, 2.3 kDa, 2.4 kDa, 2.5 kDa, 2.6 kDa, 2.7 kDa, 2.8 kDa, 2.9 kDa, 3.0 kDa, 3.1 kDa, 3.2 kDa, 3.3 kDa, or 3.4 kDa; from 1.4 kDa to: 1.5 kDa, 1.6 kDa, 1.7 kDa, 1.8 kDa, 1.9 kDa, 2.0 kDa, 2.1 kDa, 2.2 kDa, 2.3 kDa, 2.4 kDa, 2.5 kDa, 2.6 kDa, 2.7 kDa, 2.8 kDa, 2.9 kDa, 3.0 kDa, 3.1 kDa, 3.2 kDa, 3.3 kDa, or 3.4 kDa; from 1.5 kDa to: 1.6 kDa, 1.7 kDa, 1.8 kDa, 1.9 kDa, 2.0 kDa, 2.1 kDa, 2.2 kDa, 2.3 kDa, 2.4 kDa, 2.5 kDa, 2.6 kDa, 2.7 kDa, 2.8 kDa, 2.9 kDa, 3.0 kDa, 3.1 kDa, 3.2 kDa, 3.3 kDa, or 3.4 kDa; from 1.6 kDa to: 1.7 kDa, 1.8 kDa, 1.9 kDa, 2.0 kDa, 2.1 kDa, 2.2 kDa, 2.3 kDa, 2.4 kDa, 2.5 kDa, 2.6 kDa, 2.7 kDa, 2.8 kDa, 2.9 kDa, 3.0 kDa, 3.1 kDa, 3.2 kDa, 3.3 kDa, or 3.4 kDa; from 1.7 kDa to: 1.8 kDa, 1.9 kDa, 2.0 kDa, 2.1 kDa, 2.2 kDa, 2.3 kDa, 2.4 kDa, 2.5 kDa, 2.6 kDa, 2.7 kDa, 2.8 kDa, 2.9 kDa, 3.0 kDa, 3.1 kDa, 3.2 kDa, 3.3 kDa, or 3.4 kDa; from 1.8 kDa to: 1.9 kDa, 2.0 kDa, 2.1 kDa, 2.2 kDa, 2.3 kDa, 2.4 kDa, 2.5 kDa, 2.6 kDa, 2.7 kDa, 2.8 kDa, 2.9 kDa, 3.0 kDa, 3.1 kDa, 3.2 kDa, 3.3 kDa, or 3.4 kDa; from 1.9 kDa to: 2.0 kDa, 2.1 kDa, 2.2 kDa, 2.3 kDa, 2.4 kDa, 2.5 kDa, 2.6 kDa, 2.7 kDa, 2.8 kDa, 2.9 kDa, 3.0 kDa, 3.1 kDa, 3.2 kDa, 3.3 kDa, or 3.4 kDa; from 2.0 kDa to: 2.1 kDa, 2.2 kDa, 2.3 kDa, 2.4 kDa, 2.5 kDa, 2.6 kDa, 2.7 kDa, 2.8 kDa, 2.9 kDa, 3.0 kDa, 3.1 kDa, 3.2 kDa, 3.3 kDa, or 3.4 kDa; from 2.1 kDa to: 2.2 kDa, 2.3 kDa, 2.4 kDa, 2.5 kDa, 2.6 kDa, 2.7 kDa, 2.8 kDa, 2.9 kDa, 3.0 kDa, 3.1 kDa, 3.2 kDa, 3.3 kDa, or 3.4 kDa; from 2.2 kDa to: 2.3 kDa, 2.4 kDa, 2.5 kDa, 2.6 kDa, 2.7 kDa, 2.8 kDa, 2.9 kDa, 3.0 kDa, 3.1 kDa, 3.2 kDa, 3.3 kDa, or 3.4 kDa; from 2.3 kDa to: 2.4 kDa, 2.5 kDa, 2.6 kDa, 2.7 kDa, 2.8 kDa, 2.9 kDa, 3.0 kDa, 3.1 kDa, 3.2 kDa, 3.3 kDa, or 3.4 kDa; from 2.5 to: 2.6 kDa, 2.7 kDa, 2.8 kDa, 2.9 kDa, 3.0 kDa, 3.1 kDa, 3.2 kDa, 3.3 kDa, or 3.4 kDa; from 2.6 kDa to: 2.7 kDa, 2.8 kDa, 2.9 kDa, 3.0 kDa, 3.1 kDa, 3.2 kDa, 3.3 kDa, or 3.4 kDa; from 2.7 kDa to: 2.8 kDa, 2.9 kDa, 3.0 kDa, 3.1 kDa, 3.2 kDa, 3.3 kDa, or 3.4 kDa; from 2.8 kDa to: 2.9 kDa, 3.0 kDa, 3.1 kDa, 3.2 kDa, 3.3 kDa, or 3.4 kDa; from 2.9 kDa to: 3.0 kDa, 3.1 kDa, 3.2 kDa, 3.3 kDa, or 3.4 kDa; or from 3.0 kDa to: 3.1 kDa, 3.2 kDa, 3.3 kDa, or 3.4 kDa. Taking the above-noted embodiments into account, it is contemplated and supported that any of the above-noted “molecular weight from” and “molecular weight to” may be combined to provide an enclosed range (i.e. a molecular weight from 1.1 kDa to 2.4 kDa). Also contemplated and supported are combinations of the above-noted “molecular weight from” or “molecular weight to” with the molecular weight of the PEG provided in the Examples section of this document to provide an enclosed range. Also contemplated and supported are combinations of the molecular weight of the Example section of this document to provide a range (i.e. PEG having a molecular weight of from [the PEG's molecular weight of lipid X₁ in the Examples] to [the PEG's molecular weight of lipid X₂ in the Examples] wherein X₁ and X₂ represent any two exemplary PEG-conjugated lipids of the Examples.

[0453] In some embodiments, the PEGs in the PEG-conjugated lipids have a median molecular weight (i.e. number-averaged molecular weight) from: 0.5 kDa, 0.6 kDa, 0.7 kDa, 0.8 kDa, 0.9 kDa, 1.0 kDa, 1.1 kDa, 1.2 kDa, 1.3 kDa, 1.4 kDa, 1.5 kDa, 1.6 kDa, 1.7 kDa, 1.8 kDa, 1.9 kDa, 2.0 kDa, 2.1 kDa, 2.2 kDa, 2.3 kDa, 2.4 kDa, 2.5 kDa, 2.6 kDa, 2.7 kDa, 2.8 kDa, 2.9 kDa, 3.0 kDa, 3.1 kDa, 3.2 kDa, 3.3 kDa, 3.4 kDa, 3.5 kDa, 3.6 kDa, 3.7 kDa, 3.8 kDa, 3.9 kDa, 4.0 kDa, 4.1 kDa, 4.2 kDa, 4.3 kDa, 4.4 kDa, 4.5 kDa, 4.6 kDa, 4.7 kDa, 4.8 kDa, 4.9 kDa, 5.0 kDa, 5.1 kDa, 5.2 kDa, 5.3 kDa, 5.4 kDa, 5.5 kDa, 5.6 kDa, 5.7 kDa, 5.8 kDa, 5.9 kDa, or 6.0 kDa. In some embodiments, PEGs in the PEG-conjugated lipids have a median molecular weight (i.e. number-averaged molecular weight) to: 8 kDa, 7.9 kDa, 7.8 kDa, 7.7 kDa, 7.6 kDa, 7.5 kDa, 7.4 kDa, 7.3 kDa, 7.2 kDa, 7.1 kDa, 7 kDa, 6.9 kDa, 6.8 kDa, 6.7 kDa, 6.6 kDa, 6.5 kDa, 6.4 kDa, 6.3 kDa, 6.2 kDa, 6.1 kDa, 6 kDa, 5.9 kDa, 5.8 kDa, 5.7 kDa, 5.6 kDa, 5.5 kDa, 5.4 kDa, 5.3 kDa, 5.2 kDa, 5.1 kDa, 5 kDa, 4.9 kDa, 4.8 kDa, 4.7 kDa, 4.6 kDa, 4.5 kDa, 4.4 kDa, 4.3 kDa, 4.2 kDa, 4.1 kDa, 4 kDa, 3.9 kDa, 3.8 kDa, 3.7 kDa, 3.6 kDa, 3.5 kDa, 3.4 kDa, 3.3 kDa, 3.2 kDa, 3.1 kDa, 3 kDa, 2.9 kDa, 2.8 kDa, 2.7 kDa, 2.6 kDa, 2.5 kDa, 2.4 kDa, 2.3 kDa, 2.2 kDa, 2.1 kDa, 2 kDa, 1.9 kDa, 1.8 kDa, 1.7 kDa, 1.6 kDa, 1.5 kDa, 1.4 kDa, 1.3 kDa, 1.2 kDa, or 1.1 kDa. In some embodiments, the PEGs in the PEG-conjugated lipids have a median molecular weight (i.e. number-averaged molecular weight) from 0.5 kDa to: 0.6 kDa, 0.7 kDa, 0.8 kDa, 0.9 kDa, 1.0 kDa, 1.1 kDa, 1.2 kDa, 1.3 kDa, 1.4 kDa, 1.5 kDa, 1.6 kDa, 1.7 kDa, 1.8 kDa, 1.9 kDa, 2.0 kDa, 2.1 kDa, 2.2 kDa, 2.3 kDa, 2.4 kDa, 2.5 kDa, 2.6 kDa, 2.7 kDa, 2.8 kDa, 2.9 kDa, 3.0 kDa, 3.1 kDa, 3.2 kDa, 3.3 kDa, or 3.4 kDa; from 0.6 kDa to: 0.7 kDa, 0.8 kDa, 0.9 kDa, 1.0 kDa, 1.1 kDa, 1.2 kDa, 1.3 kDa, 1.4 kDa, 1.5 kDa, 1.6 kDa, 1.7 kDa, 1.8 kDa, 1.9 kDa, 2.0 kDa, 2.1 kDa, 2.2 kDa, 2.3 kDa, 2.4 kDa, 2.5 kDa, 2.6 kDa, 2.7 kDa, 2.8 kDa, 2.9 kDa, 3.0 kDa, 3.1 kDa, 3.2 kDa, 3.3 kDa, or 3.4 kDa; from 0.7 kDa to: 0.8 kDa, 0.9 kDa, 1.0 kDa, 1.1 kDa, 1.2 kDa, 1.3 kDa, 1.4 kDa, 1.5 kDa, 1.6 kDa, 1.7 kDa, 1.8 kDa, 1.9 kDa, 2.0 kDa, 2.1 kDa, 2.2 kDa, 2.3 kDa, 2.4 kDa, 2.5 kDa, 2.6 kDa, 2.7 kDa, 2.8 kDa, 2.9 kDa, 3.0 kDa, 3.1 kDa, 3.2 kDa, 3.3 kDa, or 3.4 kDa; from 0.8 kDa to: 0.9 kDa, 1.0 kDa, 1.1 kDa, 1.2 kDa, 1.3 kDa, 1.4 kDa, 1.5 kDa, 1.6 kDa, 1.7 kDa, 1.8 kDa, 1.9 kDa, 2.0 kDa, 2.1 kDa, 2.2 kDa, 2.3 kDa, 2.4 kDa, 2.5 kDa, 2.6 kDa, 2.7 kDa, 2.8 kDa, 2.9 kDa, 3.0 kDa, 3.1 kDa, 3.2 kDa, 3.3 kDa, or 3.4 kDa; from 0.9 kDa to: 0.0 kDa, 1.1 kDa, 1.2 kDa, 1.3 kDa, 1.4 kDa, 1.5 kDa, 1.6 kDa, 1.7 kDa, 1.8 kDa, 1.9 kDa, 2.0 kDa, 2.1 kDa, 2.2 kDa, 2.3 kDa, 2.4 kDa, 2.5 kDa, 2.6 kDa, 2.7 kDa, 2.8 kDa, 2.9 kDa, 3.0 kDa, 3.1 kDa, 3.2 kDa, 3.3 kDa, or 3.4 kDa; from 1.0 kDa to: 1.1 kDa, 1.2 kDa, 1.3 kDa, 1.4 kDa, 1.5 kDa, 1.6 kDa, 1.7 kDa, 1.8 kDa, 1.9 kDa, 2.0 kDa, 2.1 kDa, 2.2 kDa, 2.3 kDa, 2.4 kDa, 2.5 kDa, 2.6 kDa, 2.7 kDa, 2.8 kDa, 2.9 kDa, 3.0 kDa, 3.1 kDa, 3.2 kDa, 3.3 kDa, or 3.4 kDa; from 1.1 kDa to: 1.2 kDa, 1.3 kDa, 1.4 kDa, 1.5 kDa, 1.6 kDa, 1.7 kDa, 1.8 kDa, 1.9 kDa, 2.0 kDa, 2.1 kDa, 2.2 kDa, 2.3 kDa, 2.4 kDa, 2.5 kDa, 2.6 kDa, 2.7 kDa, 2.8 kDa, 2.9 kDa, 3.0 kDa, 3.1 kDa, 3.2 kDa, 3.3 kDa, or 3.4 kDa; from 1.2 kDa to: 1.3 kDa, 1.4 kDa, 1.5 kDa, 1.6 kDa, 1.7 kDa, 1.8 kDa, 1.9 kDa, 2.0 kDa, 2.1 kDa, 2.2 kDa, 2.3 kDa, 2.4 kDa, 2.5 kDa, 2.6 kDa, 2.7 kDa, 2.8 kDa, 2.9 kDa, 3.0 kDa, 3.1 kDa, 3.2 kDa, 3.3 kDa, or 3.4 kDa; from 1.3 kDa to: 1.4 kDa, 1.5 kDa, 1.6 kDa, 1.7 kDa, 1.8 kDa, 1.9 kDa, 2.0 kDa, 2.1 kDa, 2.2 kDa, 2.3 kDa, 2.4 kDa, 2.5 kDa, 2.6 kDa, 2.7 kDa, 2.8 kDa, 2.9 kDa, 3.0 kDa, 3.1 kDa, 3.2 kDa, 3.3 kDa, or 3.4 kDa; from 1.4 kDa to: 1.5 kDa, 1.6 kDa, 1.7 kDa, 1.8 kDa, 1.9 kDa, 2.0 kDa, 2.1 kDa, 2.2 kDa, 2.3 kDa, 2.4 kDa, 2.5 kDa, 2.6 kDa, 2.7 kDa, 2.8 kDa, 2.9 kDa, 3.0 kDa, 3.1 kDa, 3.2 kDa, 3.3 kDa, or 3.4 kDa; from 1.5 kDa to: 1.6 kDa, 1.7 kDa, 1.8 kDa, 1.9 kDa, 2.0 kDa, 2.1 kDa, 2.2 kDa, 2.3 kDa, 2.4 kDa, 2.5 kDa, 2.6 kDa, 2.7 kDa, 2.8 kDa, 2.9 kDa, 3.0 kDa, 3.1 kDa, 3.2 kDa, 3.3 kDa, or 3.4 kDa; from 1.6 kDa to: 1.7 kDa, 1.8 kDa, 1.9 kDa, 2.0 kDa, 2.1 kDa, 2.2 kDa, 2.3 kDa, 2.4 kDa, 2.5 kDa, 2.6 kDa, 2.7 kDa, 2.8 kDa, 2.9 kDa, 3.0 kDa, 3.1 kDa, 3.2 kDa, 3.3 kDa, or 3.4 kDa; from 1.7 kDa to: 1.8 kDa, 1.9 kDa, 2.0 kDa, 2.1 kDa, 2.2 kDa, 2.3 kDa, 2.4 kDa, 2.5 kDa, 2.6 kDa, 2.7 kDa, 2.8 kDa, 2.9 kDa, 3.0 kDa, 3.1 kDa, 3.2 kDa, 3.3 kDa, or 3.4 kDa; from 1.8 kDa to: 1.9 kDa, 2.0 kDa, 2.1 kDa, 2.2 kDa, 2.3 kDa, 2.4 kDa, 2.5 kDa, 2.6 kDa, 2.7 kDa, 2.8 kDa, 2.9 kDa, 3.0 kDa, 3.1 kDa, 3.2 kDa, 3.3 kDa, or 3.4 kDa; from 1.9 kDa to: 2.0 kDa, 2.1 kDa, 2.2 kDa, 2.3 kDa, 2.4 kDa, 2.5 kDa, 2.6 kDa, 2.7 kDa, 2.8 kDa, 2.9 kDa, 3.0 kDa, 3.1 kDa, 3.2 kDa, 3.3 kDa, or 3.4 kDa; from 2.0 kDa to: 2.1 kDa, 2.2 kDa, 2.3 kDa, 2.4 kDa, 2.5 kDa, 2.6 kDa, 2.7 kDa, 2.8 kDa, 2.9 kDa, 3.0 kDa, 3.1 kDa, 3.2 kDa, 3.3 kDa, or 3.4 kDa; from 2.1 kDa to: 2.2 kDa, 2.3 kDa, 2.4 kDa, 2.5 kDa, 2.6 kDa, 2.7 kDa, 2.8 kDa, 2.9 kDa, 3.0 kDa, 3.1 kDa, 3.2 kDa, 3.3 kDa, or 3.4 kDa; from 2.2 kDa to: 2.3 kDa, 2.4 kDa, 2.5 kDa, 2.6 kDa, 2.7 kDa, 2.8 kDa, 2.9 kDa, 3.0 kDa, 3.1 kDa, 3.2 kDa, 3.3 kDa, or 3.4 kDa; from 2.3 kDa to: 2.4 kDa, 2.5 kDa, 2.6 kDa, 2.7 kDa, 2.8 kDa, 2.9 kDa, 3.0 kDa, 3.1 kDa, 3.2 kDa, 3.3 kDa, or 3.4 kDa; from 2.5 to: 2.6 kDa, 2.7 kDa, 2.8 kDa, 2.9 kDa, 3.0 kDa, 3.1 kDa, 3.2 kDa, 3.3 kDa, or 3.4 kDa; from 2.6 kDa to: 2.7 kDa, 2.8 kDa, 2.9 kDa, 3.0 kDa, 3.1 kDa, 3.2 kDa, 3.3 kDa, or 3.4 kDa; from 2.7 kDa to: 2.8 kDa, 2.9 kDa, 3.0 kDa, 3.1 kDa, 3.2 kDa, 3.3 kDa, or 3.4 kDa; from 2.8 kDa to: 2.9 kDa, 3.0 kDa, 3.1 kDa, 3.2 kDa, 3.3 kDa, or 3.4 kDa; from 2.9 kDa to: 3.0 kDa, 3.1 kDa, 3.2 kDa, 3.3 kDa, or 3.4 kDa; or from 3.0 kDa to: 3.1 kDa, 3.2 kDa, 3.3 kDa, or 3.4 kDa. Taking the above-noted embodiments into account, it is contemplated and supported that any of the above-noted “median molecular weight (i.e. number-averaged molecular weight) from” and “median molecular weight (i.e. number-averaged molecular weight) to” may be combined to provide an enclosed range (i.e. a median molecular weight (i.e. number-averaged molecular weight) from 1.1 kDa to 2.4 kDa). Also contemplated and supported are combinations of the above-noted “median molecular weight (i.e. number-averaged molecular weight) from” or “median molecular weight (i.e. number-averaged molecular weight) to” with the median molecular weight of the PEG provided in the Examples section of this document to provide an enclosed range. Also contemplated and supported are combinations of the median molecular weight (i.e. number-averaged molecular weight) of the Example section of this document to provide a range (i.e. PEG having a median molecular weight (i.e. number-averaged molecular weight) of from [the PEG's median molecular weight (i.e. number-averaged molecular weight) of lipid X₁ in the Examples] to [the PEG's median molecular weight (i.e. number-averaged molecular weight) of lipid X₂ in the Examples] wherein X₁ and X₂ represent any two exemplary PEG-conjugated lipids of the Examples.

[0454] In some embodiments, the PEGs in the PEG-conjugated lipids have a median molecular weight (i.e. number-averaged molecular weight) of: 0.5 kDa, 0.6 kDa, 0.7 kDa, 0.8 kDa, 0.9 kDa, 1.0 kDa, 1.1 kDa, 1.2 kDa, 1.3 kDa, 1.4 kDa, 1.5 kDa, 1.6 kDa, 1.7 kDa, 1.8 kDa, 1.9 kDa, 2.0 kDa, 2.1 kDa, 2.2 kDa, 2.3 kDa, 2.4 kDa, 2.5 kDa, 2.6 kDa, 2.7 kDa, 2.8 kDa, 2.9 kDa, 3.0 kDa, 3.1 kDa, 3.2 kDa, 3.3 kDa, 3.4 kDa, 3.5 kDa, 3.6 kDa, 3.7 kDa, 3.8 kDa, 3.9 kDa, 4.0 kDa, 4.1 kDa, 4.2 kDa, 4.3 kDa, 4.4 kDa, 4.5 kDa, 4.6 kDa, 4.7 kDa, 4.8 kDa, 4.9 kDa, 5.0 kDa, 5.1 kDa, 5.2 kDa, 5.3 kDa, 5.4 kDa, 5.5 kDa, 5.6 kDa, 5.7 kDa, 5.8 kDa, 5.9 kDa, or 6.0 kDa.

[0455] In some embodiments, the PEG-conjugated lipid comprises 1,2-dimyristoyl-rac-glycero-3-methoxypolyethylene glycol-2000. In 1,2-dimyristoyl-rac-glycero-3-methoxypolyethylene glycol-2000, the “2000” represents the median molecular weight in Daltons of the PEG. In some embodiments, the PEG-conjugated lipid comprises 1,2-dimyristoyl-sn-glycero-2-phosphoethanolamine-N-[methoxy(polyethylene glycol)]. In some embodiments, the PEG-conjugated lipid comprises 1,2-dimyristoyl-rac-glycerol-3-methoxypolyethylene glycol.

### Second Lipids

[0456] In some embodiments, the LNP further comprises a second lipid, which comprises an anionic lipid, a neutral lipid, or a zwitterionic lipid. In some embodiments, the neutral lipid comprises a neutral zwitterionic lipid. In some embodiments, the anionic lipid, a neutral lipid, or the zwitterionic lipid comprises a phospho-group (i.e. is a phospholipid), a choline, or a sphingolipid.

[0457] In some embodiments, the second lipid comprises 1,2-diheptadecanoyl-sn-glycero-3-phosphoethanolamine (17:0 PE), 1,2-dihexanoyl-sn-glycero-3-phosphoethanolamine (06:0 PE), 1,2-dioctanoyl-sn-glycero-3-phosphoethanolamine (08:0 PE), 1,2-didecanoyl-sn-glycero-3-phosphoethanolamine (10:0 PE), 1,2-dilauroyl-sn-glycero-3-phosphoethanolamine (12:0 PE), 1,2-dipentadecanoyl-sn-glycero-3-phosphoethanolamine (15:0 PE), 1,2-dipalmitoyl-sn-glycero-3-phosphoethanolamine (16:0 PE), 1,2-distearoyl-sn-glycero-3-phosphoethanolamine (18:0 PE), 1,2-dimyristoyl-sn-glycero-3-phosphoethanolamine (14:0 PE), 1,2-dipalmitoleoyl-sn-glycero-3-phosphoethanolamine (16:1 PE), 1,2-dioleoyl-sn-glycero-3-phosphoethanolamine (DOPE), 1,2-dielaidoyl-sn-glycero-3-phosphoethanolamine (18:1 (A9-Trans) PE), 1,2-dilinoleoyl-sn-glycero-3-phosphoethanolamine (18:2 PE), 1,2-dilinolenoyl-sn-glycero-3-phosphoethanolamine (18:3 PE), 1,2-didocosahexaenoyl-sn-glycero-3-phosphoethanolamine (22:6 PE), 1,2-diarachidonoyl-sn-glycero-3-phosphoethanolamine (20:4 PE), 1-pentadecanoyl-2-oleoyl-sn-glycero-3-phosphoethanolamine (15:0-18:1 PE), 1-palmitoyl-2-linoleoyl-sn-glycero-3-phosphoethanolamine (16:0-18:2 PE), 1-palmitoyl-2-oleoyl-sn-glycero-3-phosphoethanolamine (16:0-18:1 PE), 1-stearoyl-2-oleoyl-sn-glycero-3-phosphoethanolamine (18:0-18:1 PE), 1-palmitoyl-2-arachidonoyl-sn-glycero-3-phosphoethanolamine (16:0-20:4 PE), 1-palmitoyl-2-docosahexaenoyl-sn-glycero-3-phosphoethanolamine (16:0-22:6 PE), 1-stearoyl-2-linoleoyl-sn-glycero-3-phosphoethanolamine (18:0-18:2 PE), 1-stearoyl-2-arachidonoyl-sn-glycero-3-phosphoethanolamine (18:0-20:4 PE), 1-stearoyl-2-docosahexaenoyl-sn-glycero-3-phosphoethanolamine (18:0-22:6 PE), 1-oleoyl-2-hydroxy-sn-glycero-3-phosphoethanolamine (18:1 Lyso PE), 1-hydroxy-2-oleoyl-sn-glycero-3-phosphoethanolamine (2-18:1 Lyso PE), 1-palmitoyl-2-hydroxy-sn-glycero-3-phosphoethanolamine (16:0 Lyso PE), 1-tridecanoyl-sn-glycero-3-phosphoethanolamine (13:0 Lyso PE), 1-(10Z-heptadecenoyl)-sn-glycero-3-phosphoethanolamine (17:1 Lyso PE), 1-stearoyl-2-hydroxy-sn-glycero-3-phosphoethanolamine (18:0 Lyso PE), 1-myristoyl-2-hydroxy-sn-glycero-3-phosphoethanolamine (14:0 Lyso PE), L-a-phosphatidylethanolamine, 1,2-dibutyryl-sn-glycero-3-phosphocholine (04:0 PC), 1,2-dihexanoyl-sn-glycero-3-phosphocholine (DHPC), 1,2-diheptanoyl-sn-glycero-3-phosphocholine (7:0 PC), 1,2-dioctanoyl-sn-glycero-3-phosphocholine (8:0 PC), 1,2-dinonanoyl-sn-glycero-3-phosphocholine (9:0 PC), 1,2-didecanoyl-sn-glycero-3-phosphocholine (10:0 PC), 1,2-diundecanoyl-sn-glycero-3-phosphocholine (11:0 PC), 1,3-dipalmitoyl-rac-glycero-2-phosphocholine (16:0 2—PC), 1,2-dilauroyl-sn-glycero-3-phosphocholine (DLPC), 1,2-ditridecanoyl-sn-glycero-3-phosphocholine (13:0 PC), 1,2-dimyristoyl-sn-glycero-3-phosphocholine (DMPC), 1,2-dipentadecanoyl-sn-glycero-3-phosphocholine (15:0 PC), 1,2-dipalmitoyl-sn-glycero-3-phosphocholine (DPPC), 1,2-diheptadecanoyl-sn-glycero-3-phosphocholine (17:0 PC), 1,2-distearoyl-sn-glycero-3-phosphocholine (DSPC), 1,2-distearoyl-sn-glycero-3-phosphocholine (19:0 PC), 1,2-diarachidoyl-sn-glycero-3-phosphocholine (20:0 PC), 1,2-diheneicosanoyl-sn-glycero-3-phosphocholine (21:0 PC), 1,2-dibehenoyl-sn-glycero-3-phosphocholine (22:0 PC), 1,2-ditricosanoyl-sn-glycero-3-phosphocholine (23:0 PC), 1,2-dilignoceroyl-sn-glycero-3-phosphocholine (24:0 PC), 1,2-divaccenoyl-sn-glycero-3-phosphocholine (18:1 (11-cis) PC), 1,2-di[(8Z)octadecenoyl]-sn-glycero-3-phosphocholine (18:1 (8-cis) PC), 1,2-dimyristoleoyl-sn-glycero-3-phosphocholine (14:1 (A9-cis) PC), 1,2-dipetroselenoyl-sn-glycero-3-phosphocholine (18:1 (A6-cis) PC), 1,2-dioleoyl-sn-glycero-3-phosphocholine (DOPC), 1,2-dielaidoyl-sn-glycero-3-phosphocholine (18:1 (A9-trans) PC), 1,2-diheptadecanoyl-sn-glycero-3-phospho-(1′-rac-glycerol), 1,2-dihexanoyl-sn-glycero-3-phospho-(1′-rac-glycerol), 1,2-dioctanoyl-sn-glycero-3-phospho-(1′-rac-glycerol), 1,2-didecanoyl-sn-glycero-3-phospho-(1′-rac-glycerol), 1,2-dilauroyl-sn-glycero-3-phospho-(1′-rac-glycerol), 1,2-dimyristoyl-sn-glycero-3-phospho-(1′-rac-glycerol), 1,2-dipentadecanoyl-sn-glycero-3-phospho-(1′-rac-glycerol), 1,2-dipalmitoyl-sn-glycero-3-phospho-(1′-rac-glycerol), 1,2-distearoyl-sn-glycero-3-phospho-(1′-rac-glycerol), 1,2-dioleoyl-sn-glycero-3-phospho-(1′-rac-glycerol), 1,2-dielaidoyl-sn-glycero-3-phospho-(1′-rac-glycerol), 1,2-dilinoleoyl-sn-glycero-3-phospho-(1′-rac-glycerol), 1,2-dilinolenoyl-sn-glycero-3-phospho-(1′-rac-glycerol), 1,2-diarachidonoyl-sn-glycero-3-[phospho-rac-(1-glycerol)], 1,2-didocosahexaenoyl-sn-glycero-3-[phospho-rac-(1-glycerol)], 1,2-dilinoleoyl-sn-glycero-3-phosphocholine (DLPC), 1,2-dilinolenoyl-sn-glycero-3-phosphocholine (18:3 (cis) PC), 1,2-dieicosenoyl-sn-glycero-3-phosphocholine (20:1 (cis) PC), 1,2-diarachidonoyl-sn-glycero-3-phosphocholine (20:4 (cis) PC), 1,2-dierucoyl-sn-glycero-3-phosphocholine (22:1 (cis) PC), 1,2-dinervonoyl-sn-glycero-3-phosphocholine (24:1 (cis) PC), 1,2-didocosahexaenoyl-sn-glycero-3-phosphocholine (22:6 (cis) PC), 1-pentadecanoyl-2-oleoyl-sn-glycero-3-phosphocholine (15:0-18:1 PC), 1-myristoyl-2-palmitoyl-sn-glycero-3-phosphocholine (14:0-16:0 PC), 1-myristoyl-2-stearoyl-sn-glycero-3-phosphocholine (14:0-18:0 PC), 1-palmitoyl-2-myristoyl-sn-glycero-3-phosphocholine (16:0-14:0 PC), 1-palmitoyl-2-stearoyl-sn-glycero-3-phosphocholine (16:0-18:0 PC), 1-palmitoyl-2-oleoyl-glycero-3-phosphocholine (POPC), 1-palmitoyl-2-linoleoyl-sn-glycero-3-phosphocholine (16:0-18:2 PC), 1-palmitoyl-2-arachidonoyl-sn-glycero-3-phosphocholine (16:0-20:4 PC), 1-palmitoyl-2-docosahexaenoyl-sn-glycero-3-phosphocholine (16:0-22:6 PC), 1-stearoyl-2-myristoyl-sn-glycero-3-phosphocholine (18:0-14:0 PC), 1-stearoyl-2-palmitoyl-sn-glycero-3-phosphocholine (18:0-16:0 PC), 1-stearoyl-2-oleoyl-sn-glycero-3-phosphocholine (18:0-18:1 PC), 1-stearoyl-2-linoleoyl-sn-glycero-3-phosphocholine (18:0-18:2 PC), 1-stearoyl-2-arachidonoyl-sn-glycero-3-phosphocholine (18:0-20:4 PC), 1-stearoyl-2-docosahexaenoyl-sn-glycero-3-phosphocholine (18:0-22:6 PC), 1-oleoyl-2-myristoyl-sn-glycero-3-phosphocholine (18:1-14:0 PC), 1-oleoyl-2-palmitoyl-sn-glycero-3-phosphocholine (18:1-16:0 PC), 1-oleoyl-2-stearoyl-sn-glycero-3-phosphocholine (18:1-18:0 PC), 1-(8Z-octadecenoyl)-2-palmitoyl-sn-glycero-3-phosphocholine (18:1(n10)-16:0 PC), 1-palmitoyl-2-acetyl-sn-glycero-3-phosphocholine (16:0-02:0 PC), 1-palmitoyl-2-[12′-(palmitoyloxy)octadecanoyl]-sn-glycero-3-phosphoholine (16:0-(12-PAHSA) PC), 1-oleoyl-2-hydroxy-sn-glycero-3-phosphocholine, 1-hexanoyl-2-hydroxy-sn-glycero-3-phosphocholine, 1-heptanoyl-2-hydroxy-sn-glycero-3-phosphocholine, 1-octanoyl-2-hydroxy-sn-glycero-3-phosphocholine, 1-nonanoyl-2-hydroxy-sn-glycero-3-phosphocholine, 1-decanoyl-2-hydroxy-sn-glycero-3-phosphocholine, 1-undecanoyl-2-hydroxy-sn-glycero-3-phosphocholine, 1-lauroyl-2-hydroxy-sn-glycero-3-phosphocholine, 1-tridecanoyl-2-hydroxy-sn-glycero-3-phosphocholine, 1-myristoyl-2-hydroxy-sn-glycero-3-phosphocholine, 1-pentadecanoyl-2-hydroxy-sn-glycero-3-phosphocholine, 1-hydroxy-2-palmitoyl-sn-glycero-3-phosphocholine, 1-palmitoyl-2-hydroxy-sn-glycero-3-phosphocholine, 1-heptadecanoyl-2-hydroxy-sn-glycero-3-phosphocholine, 1-(10Z-heptadecenoyl)-2-hydroxy-sn-glycero-3-phosphocholine, 1-hydroxy-2-oleoyl-sn-glycero-3-phosphocholine, 2-stearoyl-sn-glycero-3-phosphocholine, 1-stearoyl-2-hydroxy-sn-glycero-3-phosphocholine, 1-nonadecanoyl-2-hydroxy-sn-glycero-3-phosphocholine, 1-arachidoyl-2-hydroxy-sn-glycero-3-phosphocholine, 1-behenoyl-2-hydroxy-sn-glycero-3-phosphocholine, 1-lignoceroyl-2-hydroxy-sn-glycero-3-phosphocholine, 1-hexacosanoyl-2-hydroxy-sn-glycero-3-phosphocholine, 1,2-dimyristoyl-sn-glycero-phosphocholine (DMPC), 1,2-dipalmitoyl-sn-glycero-3-phosphocholine (DPPC), 1,2-distearoyl-sn-glycero-3-phosphocholine (DSPC), 1,2-diundecanoyl-sn-glycero-phosphocholine (DUPC), 1,2-di-O-octadecenyl-sn-glycero-3-phosphocholine (18:0 Diether PC), 1-oleoyl-2-cholesterylhemisuccinoyl-sn-glycero-3-phosphocholine (OChemsPC), 1-hexadecyl-sn-glycero-3-phosphocholine (C16 Lyso PC), 1,2-dilinolenoyl-sn-glycero-3-phosphocholine, 1,2-diarachidonoyl-sn-glycero-3-phosphocholine, 1,2-didocosahexaenoyl-sn-glycero-3-phosphocholine, 1,2-diphytanoyl-sn-glycero-3-phosphoethanolamine (ME 16.0 PE), 1,2-didocosahexaenoyl-sn-glycero-3-phosphoethanolamine, 1,2-dioleoyl-sn-glycero-3-phospho-rac-(1-glycerol) sodium salt (DOPG), N-lignoceroyl-D-erythro-sphingosylphosphoethanolamine, or sphingomyelin.

### Sterols

[0458] In some embodiments, the lipid nanoparticles further comprise a sterol. In some embodiments, the sterol comprises cholesterol, cholesterol sulfate, desmosterol, stigmasterol, lanosterol, 7-dehydrocholesterol, dihydrolanosterol, symosterol, lathosteriol, 14-demethyl-lanosterol, 8(9)-dehydrocholesterol, 8(14)-dehydrocholesterol, 14-demethyl-14-dehydrolanosterol (FF-MAS), diosgenin, dehydroepiandrosterone sulfate (DHEA sulfate), dehydroepiandrosterone, sitosterol, lanosterol-95, 4,4-dimethyl(d6)-cholest-8(9), 14-dien-3β-ol (dihydro-FF-MAS-d6), 4,4-dimethyl(d6)-cholest-8(9)-en-3β-ol (dihydro T-MAS-d6), zymostenol, sitostanol, campestanol, camperstanol, 7-dehydrodesmosterol, pregnenolone, 4,4-dimethyl-cholest-8(9)-en-3β-ol (dihyrdro T-MAS), Δ5-avensterol, brassicasterol, dihydro FF-MAS, 24-methylene cholesterol, oxysterols, deuterated sterols, fluorinated sterols, sulfonated sterols, phosphorylated sterols, A-ring substituted sterols, cholest-5-ene-3ß,4ß-diol, 5α-cholestan-3ß-ol, 4-cholesten-3-one, cholesta-8(9),24-dien-3-one, cholesta-8(9),24-dien-3-one, 2,2,3,4,4-pentadeuterio-5α-cholestan-3ß-ol, cholesteryl phosphocholine, cholesteryl-d7 pentadecanoate, cholesteryl-d7 palmitate, B-ring substituted sterols, cholestanol, 5ß,6ß-epoxy-d7, 3ß-hydroxy-5-cholestene-7-one, 6α-hydroxy-5α-cholestane, cholestanol, 5α,6α-epoxy, cholest-5-en-3ß,7α-diol, cholest-5-en-33,713-diol, cholestanol, 5α,6α-epoxy-d7, Δ5,7-cholesterol, cholesta-5,8(9)-dien-3ß-ol, cholesta-5,8(14)-dien-3ß-ol, 7α-hydroxy-4-cholesten-3-one, zymostenol-d7, zymostenol, 7-dehydrodesmosterol, 3b,5α-dihydroxy-cholestan-6-one, D-ring substituted sterols, 3ß-hydroxy-5α-cholest-8(14)-en-15-one, 3ß-hydroxy-5α-cholestane-15-one, 5α-cholest-8(14)-ene-3ß,15α-diol, 5α-cholest-8(14)-ene-3ß,15f 3,-diol, lanosterol-95, 5α-7,24-cholestadiene, 14-dehydro zymostenol, ergosta-5,7,9(11),22-tetraen-3ß-ol, cholest-5-ene-3ß,25-diol, cholest-(25R)-5-ene-3ß,27-diol, 24(R/S),25-epoxycholesterol, 24(S),25-epoxycholesterol, 24(R/S),25-epoxycholesterol-d6, cholest-5-ene-3ß,22(S)-diol, cholest-5-ene-3ß,22(R)-diol, cholest-5-ene-3ß,24(S)-diol, cholest-5-ene-3ß,24(R)-diol, 27-hydroxy-4-cholesten-3-one, campestanol, N,N-dimethyl-3ß-hydroxycholenamide, 25,27-dihydroxycholesterol, N,N-dimethyl-3ß-hydroxycholenamide, 25,27-dihydroxycholesterol, 5-cholestene-3β,20α-diol, 24S,25-epoxy-5α-cholest-8(9)-en-3β-ol, 24(S/R),25-epoxylanost-8(9)-en-3β-ol, 7-keto-27-hydroxycholesterol, 7α,27-dihydroxy-4-cholesten-3-one, 7α,27-dihydroxycholesterol, 7ß,27-dihydroxycholesterol, 5α,6ß-dihydroxycholestanol, 7α,25-dihydroxycholesterol, 7ß,25-dihydroxycholesterol, 7α,24(S)-dihydroxycholesterol, 7α,24(S)-dihydroxy-4-cholesten-3-one, 7-keto-25-hydroxycholesterol, 7α,24S,27-trihydroxycholesterol, dihydrotestosterone, testosterone, estrone, estrogen, estradiol, corticosterone, cortisol, or 24S,27-dihydroxycholesterol.

### Mole Amounts of Lipids in the LNP

[0459] In some embodiments, the lipids in the LNP have, comprise, consist of, consist essentially of, or are at least 20 mole %, 21 mole %, 22 mole %, 23 mole %, 24 mole %, 25 mole %, 26 mole %, 27 mole %, 28 mole %, 29 mole %, 30 mole %, 31 mole %, 32 mole %, 33 mole %, 34 mole %, 35 mole %, 36 mole %, 37 mole %, 38 mole %, 39 mole %, 40 mole %, 41 mole %, 42 mole %, 43 mole %, 44 mole %, 45 mole %, 46 mole %, 47 mole %, 48 mole %, 49 mole %, 50 mole %, 51 mole %, 52 mole %, 53 mole %, 54 mole %, 55 mole %, 56 mole %, 57 mole %, 58 mole %, 59 mole %, 60 mole %, 61 mole %, 62 mole %, 63 mole %, 64 mole %, 65 mole %, 66 mole %, 67 mole %, 68 mole %, 69 mole %, or 70 mole % of first lipid. In some embodiments, the lipids in the LNP have, comprise, consist of, consist essentially of, or are no more than 80 mole %, 79 mole %, 78 mole %, 77 mole %, 76 mole %, 75 mole %, 74 mole %, 73 mole %, 72 mole %, 71 mole %, 70 mole %, 69 mole %, 68 mole %, 67 mole %, 66 mole %, 65 mole %, 64 mole %, 63 mole %, 62 mole %, 61 mole %, 60 mole %, 59 mole %, 58 mole %, 57 mole %, 56 mole %, 55 mole %, 54 mole %, 53 mole %, 52 mole %, 51 mole %, 50 mole %, 49 mole %, 48 mole %, 47 mole %, 46 mole %, 45 mole %, 44 mole %, 43 mole %, 42 mole %, 41 mole %, 40 mole %, 39 mole %, 38 mole %, 37 mole %, 36 mole %, 35 mole %, 34 mole %, 33 mole %, 32 mole %, 31 mole %, 30 mole %, 29 mole %, 28 mole %, 27 mole %, 26 mole %, 25 mole %, 24 mole %, 23 mole %, 22 mole %, 21 mole %, or 20 mole % of first lipid. Taking the above-noted embodiments into account, it is contemplated and supported that any of the above-noted “mole %” of “at least” and any of the above-noted “mole %” of “no more than” may be combined to provide an enclosed range (i.e. the lipids comprise from 20 mole % to 60 mole % of the first lipid). In some embodiments, the lipids in the LNP have, comprise, consist of, consist essentially of, or are from 20 mole % to: 21 mole %, 22 mole %, 23 mole %, 24 mole %, 25 mole %, 26 mole %, 27 mole %, 28 mole %, 29 mole %, 30 mole %, 31 mole %, 32 mole %, 33 mole %, 34 mole %, 35 mole %, 36 mole %, 37 mole %, 38 mole %, 39 mole %, 40 mole %, 41 mole %, 42 mole %, 43 mole %, 44 mole %, 45 mole %, 46 mole %, 47 mole %, 48 mole %, 49 mole %, 50 mole %, 51 mole %, 52 mole %, 53 mole %, 54 mole %, 55 mole %, 56 mole %, 57 mole %, 58 mole %, 59 mole %, 60 mole %, 61 mole %, 62 mole %, 63 mole %, 64 mole %, 65 mole %, 66 mole %, 67 mole %, 68 mole %, 69 mole %, or 70 mole %; from 21 mole % to: 22 mole %, 23 mole %, 24 mole %, 25 mole %, 26 mole %, 27 mole %, 28 mole %, 29 mole %, 30 mole %, 31 mole %, 32 mole %, 33 mole %, 34 mole %, 35 mole %, 36 mole %, 37 mole %, 38 mole %, 39 mole %, 40 mole %, 41 mole %, 42 mole %, 43 mole %, 44 mole %, 45 mole %, 46 mole %, 47 mole %, 48 mole %, 49 mole %, 50 mole %, 51 mole %, 52 mole %, 53 mole %, 54 mole %, 55 mole %, 56 mole %, 57 mole %, 58 mole %, 59 mole %, 60 mole %, 61 mole %, 62 mole %, 63 mole %, 64 mole %, 65 mole %, 66 mole %, 67 mole %, 68 mole %, 69 mole %, or 70 mole %; from 22 mole % to: 23 mole %, 24 mole %, 25 mole %, 26 mole %, 27 mole %, 28 mole %, 29 mole %, 30 mole %, 31 mole %, 32 mole %, 33 mole %, 34 mole %, 35 mole %, 36 mole %, 37 mole %, 38 mole %, 39 mole %, 40 mole %, 41 mole %, 42 mole %, 43 mole %, 44 mole %, 45 mole %, 46 mole %, 47 mole %, 48 mole %, 49 mole %, 50 mole %, 51 mole %, 52 mole %, 53 mole %, 54 mole %, 55 mole %, 56 mole %, 57 mole %, 58 mole %, 59 mole %, 60 mole %, 61 mole %, 62 mole %, 63 mole %, 64 mole %, 65 mole %, 66 mole %, 67 mole %, 68 mole %, 69 mole %, or 70 mole %; from 23 mole % to: 24 mole %, 25 mole %, 26 mole %, 27 mole %, 28 mole %, 29 mole %, 30 mole %, 31 mole %, 32 mole %, 33 mole %, 34 mole %, 35 mole %, 36 mole %, 37 mole %, 38 mole %, 39 mole %, 40 mole %, 41 mole %, 42 mole %, 43 mole %, 44 mole %, 45 mole %, 46 mole %, 47 mole %, 48 mole %, 49 mole %, 50 mole %, 51 mole %, 52 mole %, 53 mole %, 54 mole %, 55 mole %, 56 mole %, 57 mole %, 58 mole %, 59 mole %, 60 mole %, 61 mole %, 62 mole %, 63 mole %, 64 mole %, 65 mole %, 66 mole %, 67 mole %, 68 mole %, 69 mole %, or 70 mole %; from 24 mole % to: 25 mole %, 26 mole %, 27 mole %, 28 mole %, 29 mole %, 30 mole %, 31 mole %, 32 mole %, 33 mole %, 34 mole %, 35 mole %, 36 mole %, 37 mole %, 38 mole %, 39 mole %, 40 mole %, 41 mole %, 42 mole %, 43 mole %, 44 mole %, 45 mole %, 46 mole %, 47 mole %, 48 mole %, 49 mole %, 50 mole %, 51 mole %, 52 mole %, 53 mole %, 54 mole %, 55 mole %, 56 mole %, 57 mole %, 58 mole %, 59 mole %, 60 mole %, 61 mole %, 62 mole %, 63 mole %, 64 mole %, 65 mole %, 66 mole %, 67 mole %, 68 mole %, 69 mole %, or 70 mole %; from 25 mole % to: 26 mole %, 27 mole %, 28 mole %, 29 mole %, 30 mole %, 31 mole %, 32 mole %, 33 mole %, 34 mole %, 35 mole %, 36 mole %, 37 mole %, 38 mole %, 39 mole %, 40 mole %, 41 mole %, 42 mole %, 43 mole %, 44 mole %, 45 mole %, 46 mole %, 47 mole %, 48 mole %, 49 mole %, 50 mole %, 51 mole %, 52 mole %, 53 mole %, 54 mole %, 55 mole %, 56 mole %, 57 mole %, 58 mole %, 59 mole %, 60 mole %, 61 mole %, 62 mole %, 63 mole %, 64 mole %, 65 mole %, 66 mole %, 67 mole %, 68 mole %, 69 mole %, or 70 mole %; from 26 mole % to: 27 mole %, 28 mole %, 29 mole %, 30 mole %, 31 mole %, 32 mole %, 33 mole %, 34 mole %, 35 mole %, 36 mole %, 37 mole %, 38 mole %, 39 mole %, 40 mole %, 41 mole %, 42 mole %, 43 mole %, 44 mole %, 45 mole %, 46 mole %, 47 mole %, 48 mole %, 49 mole %, 50 mole %, 51 mole %, 52 mole %, 53 mole %, 54 mole %, 55 mole %, 56 mole %, 57 mole %, 58 mole %, 59 mole %, 60 mole %, 61 mole %, 62 mole %, 63 mole %, 64 mole %, 65 mole %, 66 mole %, 67 mole %, 68 mole %, 69 mole %, or 70 mole %; from 27 mole % to: 28 mole %, 29 mole %, 30 mole %, 31 mole %, 32 mole %, 33 mole %, 34 mole %, 35 mole %, 36 mole %, 37 mole %, 38 mole %, 39 mole %, 40 mole %, 41 mole %, 42 mole %, 43 mole %, 44 mole %, 45 mole %, 46 mole %, 47 mole %, 48 mole %, 49 mole %, 50 mole %, 51 mole %, 52 mole %, 53 mole %, 54 mole %, 55 mole %, 56 mole %, 57 mole %, 58 mole %, 59 mole %, 60 mole %, 61 mole %, 62 mole %, 63 mole %, 64 mole %, 65 mole %, 66 mole %, 67 mole %, 68 mole %, 69 mole %, or 70 mole %; from 28 mole % to: 29 mole %, 30 mole %, 31 mole %, 32 mole %, 33 mole %, 34 mole %, 35 mole %, 36 mole %, 37 mole %, 38 mole %, 39 mole %, 40 mole %, 41 mole %, 42 mole %, 43 mole %, 44 mole %, 45 mole %, 46 mole %, 47 mole %, 48 mole %, 49 mole %, 50 mole %, 51 mole %, 52 mole %, 53 mole %, 54 mole %, 55 mole %, 56 mole %, 57 mole %, 58 mole %, 59 mole %, 60 mole %, 61 mole %, 62 mole %, 63 mole %, 64 mole %, 65 mole %, 66 mole %, 67 mole %, 68 mole %, 69 mole %, or 70 mole %; from 29 mole % to: 30 mole %, 31 mole %, 32 mole %, 33 mole %, 34 mole %, 35 mole %, 36 mole %, 37 mole %, 38 mole %, 39 mole %, 40 mole %, 41 mole %, 42 mole %, 43 mole %, 44 mole %, 45 mole %, 46 mole %, 47 mole %, 48 mole %, 49 mole %, 50 mole %, 51 mole %, 52 mole %, 53 mole %, 54 mole %, 55 mole %, 56 mole %, 57 mole %, 58 mole %, 59 mole %, 60 mole %, 61 mole %, 62 mole %, 63 mole %, 64 mole %, 65 mole %, 66 mole %, 67 mole %, 68 mole %, 69 mole %, or 70 mole %; from 30 mole % to: 31 mole %, 32 mole %, 33 mole %, 34 mole %, 35 mole %, 36 mole %, 37 mole %, 38 mole %, 39 mole %, 40 mole %, 41 mole %, 42 mole %, 43 mole %, 44 mole %, 45 mole %, 46 mole %, 47 mole %, 48 mole %, 49 mole %, 50 mole %, 51 mole %, 52 mole %, 53 mole %, 54 mole %, 55 mole %, 56 mole %, 57 mole %, 58 mole %, 59 mole %, 60 mole %, 61 mole %, 62 mole %, 63 mole %, 64 mole %, 65 mole %, 66 mole %, 67 mole %, 68 mole %, 69 mole %, or 70 mole %; from 31 mole % to: 32 mole %, 33 mole %, 34 mole %, 35 mole %, 36 mole %, 37 mole %, 38 mole %, 39 mole %, 40 mole %, 41 mole %, 42 mole %, 43 mole %, 44 mole %, 45 mole %, 46 mole %, 47 mole %, 48 mole %, 49 mole %, 50 mole %, 51 mole %, 52 mole %, 53 mole %, 54 mole %, 55 mole %, 56 mole %, 57 mole %, 58 mole %, 59 mole %, 60 mole %, 61 mole %, 62 mole %, 63 mole %, 64 mole %, 65 mole %, 66 mole %, 67 mole %, 68 mole %, 69 mole %, or 70 mole %; from 32 mole % to: 33 mole %, 34 mole %, 35 mole %, 36 mole %, 37 mole %, 38 mole %, 39 mole %, 40 mole %, 41 mole %, 42 mole %, 43 mole %, 44 mole %, 45 mole %, 46 mole %, 47 mole %, 48 mole %, 49 mole %, 50 mole %, 51 mole %, 52 mole %, 53 mole %, 54 mole %, 55 mole %, 56 mole %, 57 mole %, 58 mole %, 59 mole %, 60 mole %, 61 mole %, 62 mole %, 63 mole %, 64 mole %, 65 mole %, 66 mole %, 67 mole %, 68 mole %, 69 mole %, or 70 mole %; from 33 mole % to: 34 mole %, 35 mole %, 36 mole %, 37 mole %, 38 mole %, 39 mole %, 40 mole %, 41 mole %, 42 mole %, 43 mole %, 44 mole %, 45 mole %, 46 mole %, 47 mole %, 48 mole %, 49 mole %, 50 mole %, 51 mole %, 52 mole %, 53 mole %, 54 mole %, 55 mole %, 56 mole %, 57 mole %, 58 mole %, 59 mole %, 60 mole %, 61 mole %, 62 mole %, 63 mole %, 64 mole %, 65 mole %, 66 mole %, 67 mole %, 68 mole %, 69 mole %, or 70 mole %; from 34 mole % to: 35 mole %, 36 mole %, 37 mole %, 38 mole %, 39 mole %, 40 mole %, 41 mole %, 42 mole %, 43 mole %, 44 mole %, 45 mole %, 46 mole %, 47 mole %, 48 mole %, 49 mole %, 50 mole %, 51 mole %, 52 mole %, 53 mole %, 54 mole %, 55 mole %, 56 mole %, 57 mole %, 58 mole %, 59 mole %, 60 mole %, 61 mole %, 62 mole %, 63 mole %, 64 mole %, 65 mole %, 66 mole %, 67 mole %, 68 mole %, 69 mole %, or 70 mole %; from 35 mole % to: 36 mole %, 37 mole %, 38 mole %, 39 mole %, 40 mole %, 41 mole %, 42 mole %, 43 mole %, 44 mole %, 45 mole %, 46 mole %, 47 mole %, 48 mole %, 49 mole %, 50 mole %, 51 mole %, 52 mole %, 53 mole %, 54 mole %, 55 mole %, 56 mole %, 57 mole %, 58 mole %, 59 mole %, 60 mole %, 61 mole %, 62 mole %, 63 mole %, 64 mole %, 65 mole %, 66 mole %, 67 mole %, 68 mole %, 69 mole %, or 70 mole %; from 36 mole % to: 37 mole %, 38 mole %, 39 mole %, 40 mole %, 41 mole %, 42 mole %, 43 mole %, 44 mole %, 45 mole %, 46 mole %, 47 mole %, 48 mole %, 49 mole %, 50 mole %, 51 mole %, 52 mole %, 53 mole %, 54 mole %, 55 mole %, 56 mole %, 57 mole %, 58 mole %, 59 mole %, 60 mole %, 61 mole %, 62 mole %, 63 mole %, 64 mole %, 65 mole %, 66 mole %, 67 mole %, 68 mole %, 69 mole %, or 70 mole %; from 37 mole % to: 38 mole %, 39 mole %, 40 mole %, 41 mole %, 42 mole %, 43 mole %, 44 mole %, 45 mole %, 46 mole %, 47 mole %, 48 mole %, 49 mole %, 50 mole %, 51 mole %, 52 mole %, 53 mole %, 54 mole %, 55 mole %, 56 mole %, 57 mole %, 58 mole %, 59 mole %, 60 mole %, 61 mole %, 62 mole %, 63 mole %, 64 mole %, 65 mole %, 66 mole %, 67 mole %, 68 mole %, 69 mole %, or 70 mole %; from 38 mole % to: 39 mole %, 40 mole %, 41 mole %, 42 mole %, 43 mole %, 44 mole %, 45 mole %, 46 mole %, 47 mole %, 48 mole %, 49 mole %, 50 mole %, 51 mole %, 52 mole %, 53 mole %, 54 mole %, 55 mole %, 56 mole %, 57 mole %, 58 mole %, 59 mole %, 60 mole %, 61 mole %, 62 mole %, 63 mole %, 64 mole %, 65 mole %, 66 mole %, 67 mole %, 68 mole %, 69 mole %, or 70 mole %; from 39 mole % to: 40 mole %, 41 mole %, 42 mole %, 43 mole %, 44 mole %, 45 mole %, 46 mole %, 47 mole %, 48 mole %, 49 mole %, 50 mole %, 51 mole %, 52 mole %, 53 mole %, 54 mole %, 55 mole %, 56 mole %, 57 mole %, 58 mole %, 59 mole %, 60 mole %, 61 mole %, 62 mole %, 63 mole %, 64 mole %, 65 mole %, 66 mole %, 67 mole %, 68 mole %, 69 mole %, or 70 mole %; from 40 mole % to: 41 mole %, 42 mole %, 43 mole %, 44 mole %, 45 mole %, 46 mole %, 47 mole %, 48 mole %, 49 mole %, 50 mole %, 51 mole %, 52 mole %, 53 mole %, 54 mole %, 55 mole %, 56 mole %, 57 mole %, 58 mole %, 59 mole %, 60 mole %, 61 mole %, 62 mole %, 63 mole %, 64 mole %, 65 mole %, 66 mole %, 67 mole %, 68 mole %, 69 mole %, or 70 mole %; from 41 mole % to: 41 mole %, 42 mole %, 43 mole %, 44 mole %, 45 mole %, 46 mole %, 47 mole %, 48 mole %, 49 mole %, 50 mole %, 51 mole %, 52 mole %, 53 mole %, 54 mole %, 55 mole %, 56 mole %, 57 mole %, 58 mole %, 59 mole %, 60 mole %, 61 mole %, 62 mole %, 63 mole %, 64 mole %, 65 mole %, 66 mole %, 67 mole %, 68 mole %, 69 mole %, or 70 mole %; from 42 mole % to: 43 mole %, 44 mole %, 45 mole %, 46 mole %, 47 mole %, 48 mole %, 49 mole %, 50 mole %, 51 mole %, 52 mole %, 53 mole %, 54 mole %, 55 mole %, 56 mole %, 57 mole %, 58 mole %, 59 mole %, 60 mole %, 61 mole %, 62 mole %, 63 mole %, 64 mole %, 65 mole %, 66 mole %, 67 mole %, 68 mole %, 69 mole %, or 70 mole %; from 43 mole % to: 44 mole %, 45 mole %, 46 mole %, 47 mole %, 48 mole %, 49 mole %, 50 mole %, 51 mole %, 52 mole %, 53 mole %, 54 mole %, 55 mole %, 56 mole %, 57 mole %, 58 mole %, 59 mole %, 60 mole %, 61 mole %, 62 mole %, 63 mole %, 64 mole %, 65 mole %, 66 mole %, 67 mole %, 68 mole %, 69 mole %, or 70 mole %; from 44 mole % to: 45 mole %, 46 mole %, 47 mole %, 48 mole %, 49 mole %, 50 mole %, 51 mole %, 52 mole %, 53 mole %, 54 mole %, 55 mole %, 56 mole %, 57 mole %, 58 mole %, 59 mole %, 60 mole %, 61 mole %, 62 mole %, 63 mole %, 64 mole %, 65 mole %, 66 mole %, 67 mole %, 68 mole %, 69 mole %, or 70 mole %; from 45 mole % to: 46 mole %, 47 mole %, 48 mole %, 49 mole %, 50 mole %, 51 mole %, 52 mole %, 53 mole %, 54 mole %, 55 mole %, 56 mole %, 57 mole %, 58 mole %, 59 mole %, 60 mole %, 61 mole %, 62 mole %, 63 mole %, 64 mole %, 65 mole %, 66 mole %, 67 mole %, 68 mole %, 69 mole %, or 70 mole %; from 46 mole % to: 47 mole %, 48 mole %, 49 mole %, 50 mole %, 51 mole %, 52 mole %, 53 mole %, 54 mole %, 55 mole %, 56 mole %, 57 mole %, 58 mole %, 59 mole %, 60 mole %, 61 mole %, 62 mole %, 63 mole %, 64 mole %, 65 mole %, 66 mole %, 67 mole %, 68 mole %, 69 mole %, or 70 mole %; from 47 mole % to: 48 mole %, 49 mole %, 50 mole %, 51 mole %, 52 mole %, 53 mole %, 54 mole %, 55 mole %, 56 mole %, 57 mole %, 58 mole %, 59 mole %, 60 mole %, 61 mole %, 62 mole %, 63 mole %, 64 mole %, 65 mole %, 66 mole %, 67 mole %, 68 mole %, 69 mole %, or 70 mole %; from 48 mole % to: 49 mole %, 50 mole %, 51 mole %, 52 mole %, 53 mole %, 54 mole %, 55 mole %, 56 mole %, 57 mole %, 58 mole %, 59 mole %, 60 mole %, 61 mole %, 62 mole %, 63 mole %, 64 mole %, 65 mole %, 66 mole %, 67 mole %, 68 mole %, 69 mole %, or 70 mole %; from 49 mole % to: 50 mole %, 51 mole %, 52 mole %, 53 mole %, 54 mole %, 55 mole %, 56 mole %, 57 mole %, 58 mole %, 59 mole %, 60 mole %, 61 mole %, 62 mole %, 63 mole %, 64 mole %, 65 mole %, 66 mole %, 67 mole %, 68 mole %, 69 mole %, or 70 mole %; from 50 mole % to: 51 mole %, 52 mole %, 53 mole %, 54 mole %, 55 mole %, 56 mole %, 57 mole %, 58 mole %, 59 mole %, 60 mole %, 61 mole %, 62 mole %, 63 mole %, 64 mole %, 65 mole %, 66 mole %, 67 mole %, 68 mole %, 69 mole %, or 70 mole %; from 51 mole % to: 52 mole %, 53 mole %, 54 mole %, 55 mole %, 56 mole %, 57 mole %, 58 mole %, 59 mole %, 60 mole %, 61 mole %, 62 mole %, 63 mole %, 64 mole %, 65 mole %, 66 mole %, 67 mole %, 68 mole %, 69 mole %, or 70 mole %; from 52 mole % to: 53 mole %, 54 mole %, 55 mole %, 56 mole %, 57 mole %, 58 mole %, 59 mole %, 60 mole %, 61 mole %, 62 mole %, 63 mole %, 64 mole %, 65 mole %, 66 mole %, 67 mole %, 68 mole %, 69 mole %, or 70 mole %; from 53 mole % to: 54 mole %, 55 mole %, 56 mole %, 57 mole %, 58 mole %, 59 mole %, 60 mole %, 61 mole %, 62 mole %, 63 mole %, 64 mole %, 65 mole %, 66 mole %, 67 mole %, 68 mole %, 69 mole %, or 70 mole %; from 54 mole % to: 55 mole %, 56 mole %, 57 mole %, 58 mole %, 59 mole %, 60 mole %, 61 mole %, 62 mole %, 63 mole %, 64 mole %, 65 mole %, 66 mole %, 67 mole %, 68 mole %, 69 mole %, or 70 mole %; from 55 mole % to: 56 mole %, 57 mole %, 58 mole %, 59 mole %, 60 mole %, 61 mole %, 62 mole %, 63 mole %, 64 mole %, 65 mole %, 66 mole %, 67 mole %, 68 mole %, 69 mole %, or 70 mole %; from 56 mole % to: 57 mole %, 58 mole %, 59 mole %, 60 mole %, 61 mole %, 62 mole %, 63 mole %, 64 mole %, 65 mole %, 66 mole %, 67 mole %, 68 mole %, 69 mole %, or 70 mole %; from 57 mole % to: 58 mole %, 59 mole %, 60 mole %, 61 mole %, 62 mole %, 63 mole %, 64 mole %, 65 mole %, 66 mole %, 67 mole %, 68 mole %, 69 mole %, or 70 mole %; from 58 mole % to: 59 mole %, 60 mole %, 61 mole %, 62 mole %, 63 mole %, 64 mole %, 65 mole %, 66 mole %, 67 mole %, 68 mole %, 69 mole %, or 70 mole %; from 59 mole % to: 60 mole %, 61 mole %, 62 mole %, 63 mole %, 64 mole %, 65 mole %, 66 mole %, 67 mole %, 68 mole %, 69 mole %, or 70 mole %; from 60 mole % to: 61 mole %, 62 mole %, 63 mole %, 64 mole %, 65 mole %, 66 mole %, 67 mole %, 68 mole %, 69 mole %, or 70 mole %; from 61 mole % to: 62 mole %, 63 mole %, 64 mole %, 65 mole %, 66 mole %, 67 mole %, 68 mole %, 69 mole %, or 70 mole %; from 62 mole % to: 63 mole %, 64 mole %, 65 mole %, 66 mole %, 67 mole %, 68 mole %, 69 mole %, or 70 mole %; from 63 mole % to: 64 mole %, 65 mole %, 66 mole %, 67 mole %, 68 mole %, 69 mole %, or 70 mole %; from 64 mole % to: 65 mole %, 66 mole %, 67 mole %, 68 mole %, 69 mole %, or 70 mole %; from 65 mole % to: 66 mole %, 67 mole %, 68 mole %, 69 mole %, or 70 mole %; from 66 mole % to: 67 mole %, 68 mole %, 69 mole %, or 70 mole %; from 67 mole % to: 68 mole %, 69 mole %, or 70 mole %; from 68 mole % to: 69 mole % or 70 mole %; or from 69 mole % to 70 mole % of first lipid. Also contemplated and supported are combinations of the above-noted “mole %” of “at least” or “mole %” of “no more than” with the mole % of the first lipid provided in the Examples section of this document. Also contemplated and supported are combinations of the mole % of the Example section of this document to provide a range (i.e. mole % from [the mole % of the first lipid of the lipids of the LNP formulation X₁ in the Examples] to [the mole % of the first lipid of the lipids of the LNP formulation X₂ in the Examples] wherein X₁ and X₂ represent any two exemplary LNP formulations of the Examples.

[0460] In some embodiments, the lipids in the LNP have, comprise, consist of, consist essentially of, or are at least 10 mole %, 11 mole %, 12 mole %, 13 mole %, 14 mole %, 15 mole %, 16 mole %, 17 mole %, 18 mole %, 19 mole %, 20 mole %, 21 mole %, 22 mole %, 23 mole %, 24 mole %, 25 mole %, 26 mole %, 27 mole %, 28 mole %, 29 mole %, 30 mole %, 31 mole %, 32 mole %, 33 mole %, 34 mole %, 35 mole %, 36 mole %, 37 mole %, 38 mole %, 39 mole %, 40 mole %, 41 mole %, 42 mole %, 43 mole %, 44 mole %, 45 mole %, 46 mole %, 47 mole %, 48 mole %, 49 mole %, 50 mole %, 51 mole %, 52 mole %, 53 mole %, 54 mole %, 55 mole %, 56 mole %, 57 mole %, 58 mole %, 59 mole %, 60 mole %, 61 mole %, 62 mole %, 63 mole %, 64 mole %, 65 mole %, 66 mole %, 67 mole %, 68 mole %, 69 mole %, or 70 mole % of sterol.

[0461] In some embodiments, the lipids in the LNP have, comprise, consist of, consist essentially of, or are no more than 80 mole %, 79 mole %, 78 mole %, 77 mole %, 76 mole %, 75 mole %, 74 mole %, 73 mole %, 72 mole %, 71 mole %, 70 mole %, 69 mole %, 68 mole %, 67 mole %, 66 mole %, 65 mole %, 64 mole %, 63 mole %, 62 mole %, 61 mole %, 60 mole %, 59 mole %, 58 mole %, 57 mole %, 56 mole %, 55 mole %, 54 mole %, 53 mole %, 52 mole %, 51 mole %, 50 mole %, 49 mole %, 48 mole %, 47 mole %, 46 mole %, 45 mole %, 44 mole %, 43 mole %, 42 mole %, 41 mole %, 40 mole %, 39 mole %, 38 mole %, 37 mole %, 36 mole %, 35 mole %, 34 mole %, 33 mole %, 32 mole %, 31 mole %, 30 mole %, 29 mole %, 28 mole %, 27 mole %, 26 mole %, 25 mole %, 24 mole %, 23 mole %, 22 mole %, 21 mole %, or 20 mole % of sterol. Taking the above-noted embodiments into account, it is contemplated and supported that any of the above-noted “mole %” of “at least” and any of the above-noted “mole %” of “no more than” may be combined to provide an enclosed range (i.e. the lipids comprise from 20 mole % to 60 mole % of sterol). In some embodiments, the lipids in the LNP have, comprise, consist of, consist essentially of, or are from 20 mole % to: 21 mole %, 22 mole %, 23 mole %, 24 mole %, 25 mole %, 26 mole %, 27 mole %, 28 mole %, 29 mole %, 30 mole %, 31 mole %, 32 mole %, 33 mole %, 34 mole %, 35 mole %, 36 mole %, 37 mole %, 38 mole %, 39 mole %, 40 mole %, 41 mole %, 42 mole %, 43 mole %, 44 mole %, 45 mole %, 46 mole %, 47 mole %, 48 mole %, 49 mole %, 50 mole %, 51 mole %, 52 mole %, 53 mole %, 54 mole %, 55 mole %, 56 mole %, 57 mole %, 58 mole %, 59 mole %, 60 mole %, 61 mole %, 62 mole %, 63 mole %, 64 mole %, 65 mole %, 66 mole %, 67 mole %, 68 mole %, 69 mole %, or 70 mole %; from 21 mole % to: 22 mole %, 23 mole %, 24 mole %, 25 mole %, 26 mole %, 27 mole %, 28 mole %, 29 mole %, 30 mole %, 31 mole %, 32 mole %, 33 mole %, 34 mole %, 35 mole %, 36 mole %, 37 mole %, 38 mole %, 39 mole %, 40 mole %, 41 mole %, 42 mole %, 43 mole %, 44 mole %, 45 mole %, 46 mole %, 47 mole %, 48 mole %, 49 mole %, 50 mole %, 51 mole %, 52 mole %, 53 mole %, 54 mole %, 55 mole %, 56 mole %, 57 mole %, 58 mole %, 59 mole %, 60 mole %, 61 mole %, 62 mole %, 63 mole %, 64 mole %, 65 mole %, 66 mole %, 67 mole %, 68 mole %, 69 mole %, or 70 mole %; from 22 mole % to: 23 mole %, 24 mole %, 25 mole %, 26 mole %, 27 mole %, 28 mole %, 29 mole %, 30 mole %, 31 mole %, 32 mole %, 33 mole %, 34 mole %, 35 mole %, 36 mole %, 37 mole %, 38 mole %, 39 mole %, 40 mole %, 41 mole %, 42 mole %, 43 mole %, 44 mole %, 45 mole %, 46 mole %, 47 mole %, 48 mole %, 49 mole %, 50 mole %, 51 mole %, 52 mole %, 53 mole %, 54 mole %, 55 mole %, 56 mole %, 57 mole %, 58 mole %, 59 mole %, 60 mole %, 61 mole %, 62 mole %, 63 mole %, 64 mole %, 65 mole %, 66 mole %, 67 mole %, 68 mole %, 69 mole %, or 70 mole %; from 23 mole % to: 24 mole %, 25 mole %, 26 mole %, 27 mole %, 28 mole %, 29 mole %, 30 mole %, 31 mole %, 32 mole %, 33 mole %, 34 mole %, 35 mole %, 36 mole %, 37 mole %, 38 mole %, 39 mole %, 40 mole %, 41 mole %, 42 mole %, 43 mole %, 44 mole %, 45 mole %, 46 mole %, 47 mole %, 48 mole %, 49 mole %, 50 mole %, 51 mole %, 52 mole %, 53 mole %, 54 mole %, 55 mole %, 56 mole %, 57 mole %, 58 mole %, 59 mole %, 60 mole %, 61 mole %, 62 mole %, 63 mole %, 64 mole %, 65 mole %, 66 mole %, 67 mole %, 68 mole %, 69 mole %, or 70 mole %; from 24 mole % to: 25 mole %, 26 mole %, 27 mole %, 28 mole %, 29 mole %, 30 mole %, 31 mole %, 32 mole %, 33 mole %, 34 mole %, 35 mole %, 36 mole %, 37 mole %, 38 mole %, 39 mole %, 40 mole %, 41 mole %, 42 mole %, 43 mole %, 44 mole %, 45 mole %, 46 mole %, 47 mole %, 48 mole %, 49 mole %, 50 mole %, 51 mole %, 52 mole %, 53 mole %, 54 mole %, 55 mole %, 56 mole %, 57 mole %, 58 mole %, 59 mole %, 60 mole %, 61 mole %, 62 mole %, 63 mole %, 64 mole %, 65 mole %, 66 mole %, 67 mole %, 68 mole %, 69 mole %, or 70 mole %; from 25 mole % to: 26 mole %, 27 mole %, 28 mole %, 29 mole %, 30 mole %, 31 mole %, 32 mole %, 33 mole %, 34 mole %, 35 mole %, 36 mole %, 37 mole %, 38 mole %, 39 mole %, 40 mole %, 41 mole %, 42 mole %, 43 mole %, 44 mole %, 45 mole %, 46 mole %, 47 mole %, 48 mole %, 49 mole %, 50 mole %, 51 mole %, 52 mole %, 53 mole %, 54 mole %, 55 mole %, 56 mole %, 57 mole %, 58 mole %, 59 mole %, 60 mole %, 61 mole %, 62 mole %, 63 mole %, 64 mole %, 65 mole %, 66 mole %, 67 mole %, 68 mole %, 69 mole %, or 70 mole %; from 26 mole % to: 27 mole %, 28 mole %, 29 mole %, 30 mole %, 31 mole %, 32 mole %, 33 mole %, 34 mole %, 35 mole %, 36 mole %, 37 mole %, 38 mole %, 39 mole %, 40 mole %, 41 mole %, 42 mole %, 43 mole %, 44 mole %, 45 mole %, 46 mole %, 47 mole %, 48 mole %, 49 mole %, 50 mole %, 51 mole %, 52 mole %, 53 mole %, 54 mole %, 55 mole %, 56 mole %, 57 mole %, 58 mole %, 59 mole %, 60 mole %, 61 mole %, 62 mole %, 63 mole %, 64 mole %, 65 mole %, 66 mole %, 67 mole %, 68 mole %, 69 mole %, or 70 mole %; from 27 mole % to: 28 mole %, 29 mole %, 30 mole %, 31 mole %, 32 mole %, 33 mole %, 34 mole %, 35 mole %, 36 mole %, 37 mole %, 38 mole %, 39 mole %, 40 mole %, 41 mole %, 42 mole %, 43 mole %, 44 mole %, 45 mole %, 46 mole %, 47 mole %, 48 mole %, 49 mole %, 50 mole %, 51 mole %, 52 mole %, 53 mole %, 54 mole %, 55 mole %, 56 mole %, 57 mole %, 58 mole %, 59 mole %, 60 mole %, 61 mole %, 62 mole %, 63 mole %, 64 mole %, 65 mole %, 66 mole %, 67 mole %, 68 mole %, 69 mole %, or 70 mole %; from 28 mole % to: 29 mole %, 30 mole %, 31 mole %, 32 mole %, 33 mole %, 34 mole %, 35 mole %, 36 mole %, 37 mole %, 38 mole %, 39 mole %, 40 mole %, 41 mole %, 42 mole %, 43 mole %, 44 mole %, 45 mole %, 46 mole %, 47 mole %, 48 mole %, 49 mole %, 50 mole %, 51 mole %, 52 mole %, 53 mole %, 54 mole %, 55 mole %, 56 mole %, 57 mole %, 58 mole %, 59 mole %, 60 mole %, 61 mole %, 62 mole %, 63 mole %, 64 mole %, 65 mole %, 66 mole %, 67 mole %, 68 mole %, 69 mole %, or 70 mole %; from 29 mole % to: 30 mole %, 31 mole %, 32 mole %, 33 mole %, 34 mole %, 35 mole %, 36 mole %, 37 mole %, 38 mole %, 39 mole %, 40 mole %, 41 mole %, 42 mole %, 43 mole %, 44 mole %, 45 mole %, 46 mole %, 47 mole %, 48 mole %, 49 mole %, 50 mole %, 51 mole %, 52 mole %, 53 mole %, 54 mole %, 55 mole %, 56 mole %, 57 mole %, 58 mole %, 59 mole %, 60 mole %, 61 mole %, 62 mole %, 63 mole %, 64 mole %, 65 mole %, 66 mole %, 67 mole %, 68 mole %, 69 mole %, or 70 mole %; from 30 mole % to: 31 mole %, 32 mole %, 33 mole %, 34 mole %, 35 mole %, 36 mole %, 37 mole %, 38 mole %, 39 mole %, 40 mole %, 41 mole %, 42 mole %, 43 mole %, 44 mole %, 45 mole %, 46 mole %, 47 mole %, 48 mole %, 49 mole %, 50 mole %, 51 mole %, 52 mole %, 53 mole %, 54 mole %, 55 mole %, 56 mole %, 57 mole %, 58 mole %, 59 mole %, 60 mole %, 61 mole %, 62 mole %, 63 mole %, 64 mole %, 65 mole %, 66 mole %, 67 mole %, 68 mole %, 69 mole %, or 70 mole %; from 31 mole % to: 32 mole %, 33 mole %, 34 mole %, 35 mole %, 36 mole %, 37 mole %, 38 mole %, 39 mole %, 40 mole %, 41 mole %, 42 mole %, 43 mole %, 44 mole %, 45 mole %, 46 mole %, 47 mole %, 48 mole %, 49 mole %, 50 mole %, 51 mole %, 52 mole %, 53 mole %, 54 mole %, 55 mole %, 56 mole %, 57 mole %, 58 mole %, 59 mole %, 60 mole %, 61 mole %, 62 mole %, 63 mole %, 64 mole %, 65 mole %, 66 mole %, 67 mole %, 68 mole %, 69 mole %, or 70 mole %; from 32 mole % to: 33 mole %, 34 mole %, 35 mole %, 36 mole %, 37 mole %, 38 mole %, 39 mole %, 40 mole %, 41 mole %, 42 mole %, 43 mole %, 44 mole %, 45 mole %, 46 mole %, 47 mole %, 48 mole %, 49 mole %, 50 mole %, 51 mole %, 52 mole %, 53 mole %, 54 mole %, 55 mole %, 56 mole %, 57 mole %, 58 mole %, 59 mole %, 60 mole %, 61 mole %, 62 mole %, 63 mole %, 64 mole %, 65 mole %, 66 mole %, 67 mole %, 68 mole %, 69 mole %, or 70 mole %; from 33 mole % to: 34 mole %, 35 mole %, 36 mole %, 37 mole %, 38 mole %, 39 mole %, 40 mole %, 41 mole %, 42 mole %, 43 mole %, 44 mole %, 45 mole %, 46 mole %, 47 mole %, 48 mole %, 49 mole %, 50 mole %, 51 mole %, 52 mole %, 53 mole %, 54 mole %, 55 mole %, 56 mole %, 57 mole %, 58 mole %, 59 mole %, 60 mole %, 61 mole %, 62 mole %, 63 mole %, 64 mole %, 65 mole %, 66 mole %, 67 mole %, 68 mole %, 69 mole %, or 70 mole %; from 34 mole % to: 35 mole %, 36 mole %, 37 mole %, 38 mole %, 39 mole %, 40 mole %, 41 mole %, 42 mole %, 43 mole %, 44 mole %, 45 mole %, 46 mole %, 47 mole %, 48 mole %, 49 mole %, 50 mole %, 51 mole %, 52 mole %, 53 mole %, 54 mole %, 55 mole %, 56 mole %, 57 mole %, 58 mole %, 59 mole %, 60 mole %, 61 mole %, 62 mole %, 63 mole %, 64 mole %, 65 mole %, 66 mole %, 67 mole %, 68 mole %, 69 mole %, or 70 mole %; from 35 mole % to: 36 mole %, 37 mole %, 38 mole %, 39 mole %, 40 mole %, 41 mole %, 42 mole %, 43 mole %, 44 mole %, 45 mole %, 46 mole %, 47 mole %, 48 mole %, 49 mole %, 50 mole %, 51 mole %, 52 mole %, 53 mole %, 54 mole %, 55 mole %, 56 mole %, 57 mole %, 58 mole %, 59 mole %, 60 mole %, 61 mole %, 62 mole %, 63 mole %, 64 mole %, 65 mole %, 66 mole %, 67 mole %, 68 mole %, 69 mole %, or 70 mole %; from 36 mole % to: 37 mole %, 38 mole %, 39 mole %, 40 mole %, 41 mole %, 42 mole %, 43 mole %, 44 mole %, 45 mole %, 46 mole %, 47 mole %, 48 mole %, 49 mole %, 50 mole %, 51 mole %, 52 mole %, 53 mole %, 54 mole %, 55 mole %, 56 mole %, 57 mole %, 58 mole %, 59 mole %, 60 mole %, 61 mole %, 62 mole %, 63 mole %, 64 mole %, 65 mole %, 66 mole %, 67 mole %, 68 mole %, 69 mole %, or 70 mole %; from 37 mole % to: 38 mole %, 39 mole %, 40 mole %, 41 mole %, 42 mole %, 43 mole %, 44 mole %, 45 mole %, 46 mole %, 47 mole %, 48 mole %, 49 mole %, 50 mole %, 51 mole %, 52 mole %, 53 mole %, 54 mole %, 55 mole %, 56 mole %, 57 mole %, 58 mole %, 59 mole %, 60 mole %, 61 mole %, 62 mole %, 63 mole %, 64 mole %, 65 mole %, 66 mole %, 67 mole %, 68 mole %, 69 mole %, or 70 mole %; from 38 mole % to: 39 mole %, 40 mole %, 41 mole %, 42 mole %, 43 mole %, 44 mole %, 45 mole %, 46 mole %, 47 mole %, 48 mole %, 49 mole %, 50 mole %, 51 mole %, 52 mole %, 53 mole %, 54 mole %, 55 mole %, 56 mole %, 57 mole %, 58 mole %, 59 mole %, 60 mole %, 61 mole %, 62 mole %, 63 mole %, 64 mole %, 65 mole %, 66 mole %, 67 mole %, 68 mole %, 69 mole %, or 70 mole %; from 39 mole % to: 40 mole %, 41 mole %, 42 mole %, 43 mole %, 44 mole %, 45 mole %, 46 mole %, 47 mole %, 48 mole %, 49 mole %, 50 mole %, 51 mole %, 52 mole %, 53 mole %, 54 mole %, 55 mole %, 56 mole %, 57 mole %, 58 mole %, 59 mole %, 60 mole %, 61 mole %, 62 mole %, 63 mole %, 64 mole %, 65 mole %, 66 mole %, 67 mole %, 68 mole %, 69 mole %, or 70 mole %; from 40 mole % to: 41 mole %, 42 mole %, 43 mole %, 44 mole %, 45 mole %, 46 mole %, 47 mole %, 48 mole %, 49 mole %, 50 mole %, 51 mole %, 52 mole %, 53 mole %, 54 mole %, 55 mole %, 56 mole %, 57 mole %, 58 mole %, 59 mole %, 60 mole %, 61 mole %, 62 mole %, 63 mole %, 64 mole %, 65 mole %, 66 mole %, 67 mole %, 68 mole %, 69 mole %, or 70 mole %; from 41 mole % to: 41 mole %, 42 mole %, 43 mole %, 44 mole %, 45 mole %, 46 mole %, 47 mole %, 48 mole %, 49 mole %, 50 mole %, 51 mole %, 52 mole %, 53 mole %, 54 mole %, 55 mole %, 56 mole %, 57 mole %, 58 mole %, 59 mole %, 60 mole %, 61 mole %, 62 mole %, 63 mole %, 64 mole %, 65 mole %, 66 mole %, 67 mole %, 68 mole %, 69 mole %, or 70 mole %; from 42 mole % to: 43 mole %, 44 mole %, 45 mole %, 46 mole %, 47 mole %, 48 mole %, 49 mole %, 50 mole %, 51 mole %, 52 mole %, 53 mole %, 54 mole %, 55 mole %, 56 mole %, 57 mole %, 58 mole %, 59 mole %, 60 mole %, 61 mole %, 62 mole %, 63 mole %, 64 mole %, 65 mole %, 66 mole %, 67 mole %, 68 mole %, 69 mole %, or 70 mole %; from 43 mole % to: 44 mole %, 45 mole %, 46 mole %, 47 mole %, 48 mole %, 49 mole %, 50 mole %, 51 mole %, 52 mole %, 53 mole %, 54 mole %, 55 mole %, 56 mole %, 57 mole %, 58 mole %, 59 mole %, 60 mole %, 61 mole %, 62 mole %, 63 mole %, 64 mole %, 65 mole %, 66 mole %, 67 mole %, 68 mole %, 69 mole %, or 70 mole %; from 44 mole % to: 45 mole %, 46 mole %, 47 mole %, 48 mole %, 49 mole %, 50 mole %, 51 mole %, 52 mole %, 53 mole %, 54 mole %, 55 mole %, 56 mole %, 57 mole %, 58 mole %, 59 mole %, 60 mole %, 61 mole %, 62 mole %, 63 mole %, 64 mole %, 65 mole %, 66 mole %, 67 mole %, 68 mole %, 69 mole %, or 70 mole %; from 45 mole % to: 46 mole %, 47 mole %, 48 mole %, 49 mole %, 50 mole %, 51 mole %, 52 mole %, 53 mole %, 54 mole %, 55 mole %, 56 mole %, 57 mole %, 58 mole %, 59 mole %, 60 mole %, 61 mole %, 62 mole %, 63 mole %, 64 mole %, 65 mole %, 66 mole %, 67 mole %, 68 mole %, 69 mole %, or 70 mole %; from 46 mole % to: 47 mole %, 48 mole %, 49 mole %, 50 mole %, 51 mole %, 52 mole %, 53 mole %, 54 mole %, 55 mole %, 56 mole %, 57 mole %, 58 mole %, 59 mole %, 60 mole %, 61 mole %, 62 mole %, 63 mole %, 64 mole %, 65 mole %, 66 mole %, 67 mole %, 68 mole %, 69 mole %, or 70 mole %; from 47 mole % to: 48 mole %, 49 mole %, 50 mole %, 51 mole %, 52 mole %, 53 mole %, 54 mole %, 55 mole %, 56 mole %, 57 mole %, 58 mole %, 59 mole %, 60 mole %, 61 mole %, 62 mole %, 63 mole %, 64 mole %, 65 mole %, 66 mole %, 67 mole %, 68 mole %, 69 mole %, or 70 mole %; from 48 mole % to: 49 mole %, 50 mole %, 51 mole %, 52 mole %, 53 mole %, 54 mole %, 55 mole %, 56 mole %, 57 mole %, 58 mole %, 59 mole %, 60 mole %, 61 mole %, 62 mole %, 63 mole %, 64 mole %, 65 mole %, 66 mole %, 67 mole %, 68 mole %, 69 mole %, or 70 mole %; from 49 mole % to: 50 mole %, 51 mole %, 52 mole %, 53 mole %, 54 mole %, 55 mole %, 56 mole %, 57 mole %, 58 mole %, 59 mole %, 60 mole %, 61 mole %, 62 mole %, 63 mole %, 64 mole %, 65 mole %, 66 mole %, 67 mole %, 68 mole %, 69 mole %, or 70 mole %; from 50 mole % to: 51 mole %, 52 mole %, 53 mole %, 54 mole %, 55 mole %, 56 mole %, 57 mole %, 58 mole %, 59 mole %, 60 mole %, 61 mole %, 62 mole %, 63 mole %, 64 mole %, 65 mole %, 66 mole %, 67 mole %, 68 mole %, 69 mole %, or 70 mole %; from 51 mole % to: 52 mole %, 53 mole %, 54 mole %, 55 mole %, 56 mole %, 57 mole %, 58 mole %, 59 mole %, 60 mole %, 61 mole %, 62 mole %, 63 mole %, 64 mole %, 65 mole %, 66 mole %, 67 mole %, 68 mole %, 69 mole %, or 70 mole %; from 52 mole % to: 53 mole %, 54 mole %, 55 mole %, 56 mole %, 57 mole %, 58 mole %, 59 mole %, 60 mole %, 61 mole %, 62 mole %, 63 mole %, 64 mole %, 65 mole %, 66 mole %, 67 mole %, 68 mole %, 69 mole %, or 70 mole %; from 53 mole % to: 54 mole %, 55 mole %, 56 mole %, 57 mole %, 58 mole %, 59 mole %, 60 mole %, 61 mole %, 62 mole %, 63 mole %, 64 mole %, 65 mole %, 66 mole %, 67 mole %, 68 mole %, 69 mole %, or 70 mole %; from 54 mole % to: 55 mole %, 56 mole %, 57 mole %, 58 mole %, 59 mole %, 60 mole %, 61 mole %, 62 mole %, 63 mole %, 64 mole %, 65 mole %, 66 mole %, 67 mole %, 68 mole %, 69 mole %, or 70 mole %; from 55 mole % to: 56 mole %, 57 mole %, 58 mole %, 59 mole %, 60 mole %, 61 mole %, 62 mole %, 63 mole %, 64 mole %, 65 mole %, 66 mole %, 67 mole %, 68 mole %, 69 mole %, or 70 mole %; from 56 mole % to: 57 mole %, 58 mole %, 59 mole %, 60 mole %, 61 mole %, 62 mole %, 63 mole %, 64 mole %, 65 mole %, 66 mole %, 67 mole %, 68 mole %, 69 mole %, or 70 mole %; from 57 mole % to: 58 mole %, 59 mole %, 60 mole %, 61 mole %, 62 mole %, 63 mole %, 64 mole %, 65 mole %, 66 mole %, 67 mole %, 68 mole %, 69 mole %, or 70 mole %; from 58 mole % to: 59 mole %, 60 mole %, 61 mole %, 62 mole %, 63 mole %, 64 mole %, 65 mole %, 66 mole %, 67 mole %, 68 mole %, 69 mole %, or 70 mole %; from 59 mole % to: 60 mole %, 61 mole %, 62 mole %, 63 mole %, 64 mole %, 65 mole %, 66 mole %, 67 mole %, 68 mole %, 69 mole %, or 70 mole %; from 60 mole % to: 61 mole %, 62 mole %, 63 mole %, 64 mole %, 65 mole %, 66 mole %, 67 mole %, 68 mole %, 69 mole %, or 70 mole %; from 61 mole % to: 62 mole %, 63 mole %, 64 mole %, 65 mole %, 66 mole %, 67 mole %, 68 mole %, 69 mole %, or 70 mole %; from 62 mole % to: 63 mole %, 64 mole %, 65 mole %, 66 mole %, 67 mole %, 68 mole %, 69 mole %, or 70 mole %; from 63 mole % to: 64 mole %, 65 mole %, 66 mole %, 67 mole %, 68 mole %, 69 mole %, or 70 mole %; from 64 mole % to: 65 mole %, 66 mole %, 67 mole %, 68 mole %, 69 mole %, or 70 mole %; from 65 mole % to: 66 mole %, 67 mole %, 68 mole %, 69 mole %, or 70 mole %; from 66 mole % to: 67 mole %, 68 mole %, 69 mole %, or 70 mole %; from 67 mole % to: 68 mole %, 69 mole %, or 70 mole %; from 68 mole % to: 69 mole % or 70 mole %; or from 69 mole % to 70 mole % of sterol. Also contemplated and supported are combinations of the above-noted “mole %” of “at least” or “mole %” of “no more than” with the mole % of sterol provided in the Examples section of this document. Also contemplated and supported are combinations of the mole % of the Example section of this document to provide a range (i.e. mole % from [the mole % of sterol of the lipids of the LNP formulation X₁ in the Examples] to [the mole % of sterol of the lipids of the LNP formulation X₂ in the Examples] wherein X, and X₂ represent any two exemplary LNP formulations of the Examples.

[0462] In some embodiments, the lipids in the LNP have, comprise, consist of, consist essentially of, or are at least 0.1 mole %, 0.2 mole %, 0.3 mole %, 0.4 mole %, 0.5 mole %, 0.6 mole %, 0.7 mole %, 0.8 mole %, 0.9 mole %, 1.0 mole %, 1.1 mole %, 1.2 mole %, 1.3 mole %, 1.4 mole %, 1.5 mole %, 1.6 mole %, 1.7 mole %, 1.8 mole %, 1.9 mole %, 2.0 mole %, 2.1 mole %, 2.2 mole %, 2.3 mole %, 2.4 mole %, 2.5 mole %, 2.6 mole %, 2.7 mole %, 2.8 mole %, 2.9 mole %, 3.0 mole %, 3.1 mole %, 3.2 mole %, 3.3 mole %, 3.4 mole %, 3.5 mole %, 3.6 mole %, 3.7 mole %, 3.8 mole %, 3.9 mole %, 4.0 mole %, 4.1 mole %, 4.2 mole %, 4.3 mole %, 4.4 mole %, 4.5 mole %, 4.6 mole %, 4.7 mole %, 4.8 mole %, 4.9 mole %, 5.0 mole %, 5.1 mole %, 5.2 mole %, 5.3 mole %, 5.4 mole %, 5.5 mole %, 5.6 mole %, 5.7 mole %, 5.8 mole %, 5.9 mole %, 6.0 mole %, 6.1 mole %, 6.2 mole %, 6.3 mole %, 6.4 mole %, 6.5 mole %, 6.6 mole %, 6.7 mole %, 6.8 mole %, 6.9 mole %, 7.0 mole %, 7.1 mole %, 7.2 mole %, 7.3 mole %, 7.4 mole %, 7.5 mole %, 7.6 mole %, 7.7 mole %, 7.8 mole %, 7.9 mole %, or 8.0 mole % of polymer-conjugated lipid. In some embodiments, the lipids in the LNP have, comprise, consist of, consist essentially of, or are no more than 8.0 mole %, 7.9 mole %, 7.8 mole %, 7.7 mole %, 7.6 mole %, 7.5 mole %, 7.4 mole %, 7.3 mole %, 7.2 mole %, 7.1 mole %, 7.0 mole %, 6.9 mole %, 6.8 mole %, 6.7 mole %, 6.6 mole %, 6.5 mole %, 6.4 mole %, 6.3 mole %, 6.2 mole %, 6.1 mole %, 6.0 mole %, 5.9 mole %, 5.8 mole %, 5.7 mole %, 5.6 mole %, 5.5 mole %, 5.4 mole %, 5.3 mole %, 5.2 mole %, 5.1 mole %, 5.0 mole %, 4.9 mole %, 4.8 mole %, 4.7 mole %, 4.6 mole %, 4.5 mole %, 4.4 mole %, 4.3 mole %, 4.2 mole %, 4.1 mole %, 4.0 mole %, 3.9 mole %, 3.8 mole %, 3.7 mole %, 3.6 mole %, 3.5 mole %, 3.4 mole %, 3.3 mole %, 3.2 mole %, 3.1 mole %, 3.0 mole %, 2.9 mole %, 2.8 mole %, 2.7 mole %, 2.6 mole %, 2.5 mole %, 2.4 mole %, 2.3 mole %, 2.2 mole %, 2.1 mole %, 2.0 mole %, 1.9 mole %, 1.8 mole %, 1.7 mole %, 1.6 mole %, 1.5 mole %, 1.4 mole %, 1.3 mole %, 1.2 mole %, 1.1 mole %, 1.0 mole %, 0.9 mole %, 0.8 mole %, 0.7 mole %, 0.6 mole %, 0.5 mole %, 0.4 mole %, 0.3 mole %, 0.2 mole %, 0.1 mole %, or no mole % of polymer-conjugated lipid. Taking the above-noted embodiments into account, it is contemplated and supported that any of the above-noted “mole %” of “at least” and any of the above-noted “mole %” of “no more than” may be combined to provide an enclosed range (i.e. the lipids comprise from 20 mole % to 60 mole % of polymer-conjugated lipid).

[0463] In some embodiments, the lipids in the LNP have, comprise, consist of, consist essentially of, or are from 0.1 mole % to: 0.2 mole %, 0.3 mole %, 0.4 mole %, 0.5 mole %, 0.6 mole %, 0.7 mole %, 0.8 mole %, 0.9 mole %, 1.0 mole %, 1.1 mole %, 1.2 mole %, 1.3 mole %, 1.4 mole %, 1.5 mole %, 1.6 mole %, 1.7 mole %, 1.8 mole %, 1.9 mole %, 2.0 mole %, 2.1 mole %, 2.2 mole %, 2.3 mole %, 2.4 mole %, 2.5 mole %, 2.6 mole %, 2.7 mole %, 2.8 mole %, 2.9 mole %, 3.0 mole %, 3.1 mole %, 3.2 mole %, 3.3 mole %, 3.4 mole %, 3.5 mole %, 3.6 mole %, 3.7 mole %, 3.8 mole %, 3.9 mole %, 4.0 mole %, 4.1 mole %, 4.2 mole %, 4.3 mole %, 4.4 mole %, 4.5 mole %, 4.6 mole %, 4.7 mole %, 4.8 mole %, 4.9 mole %, 5.0 mole %, 5.1 mole %, 5.2 mole %, 5.3 mole %, 5.4 mole %, 5.5 mole %, 5.6 mole %, 5.7 mole %, 5.8 mole %, 5.9 mole %, 6.0 mole %, 6.1 mole %, 6.2 mole %, 6.3 mole %, 6.4 mole %, 6.5 mole %, 6.6 mole %, 6.7 mole %, 6.8 mole %, 6.9 mole %, 7.0 mole %, 7.1 mole %, 7.2 mole %, 7.3 mole %, 7.4 mole %, 7.5 mole %, 7.6 mole %, 7.7 mole %, 7.8 mole %, 7.9 mole %, or 8.0 mole %; from 0.2 mole % to: 0.3 mole %, 0.4 mole %, 0.5 mole %, 0.6 mole %, 0.7 mole %, 0.8 mole %, 0.9 mole %, 1.0 mole %, 1.1 mole %, 1.2 mole %, 1.3 mole %, 1.4 mole %, 1.5 mole %, 1.6 mole %, 1.7 mole %, 1.8 mole %, 1.9 mole %, 2.0 mole %, 2.1 mole %, 2.2 mole %, 2.3 mole %, 2.4 mole %, 2.5 mole %, 2.6 mole %, 2.7 mole %, 2.8 mole %, 2.9 mole %, 3.0 mole %, 3.1 mole %, 3.2 mole %, 3.3 mole %, 3.4 mole %, 3.5 mole %, 3.6 mole %, 3.7 mole %, 3.8 mole %, 3.9 mole %, 4.0 mole %, 4.1 mole %, 4.2 mole %, 4.3 mole %, 4.4 mole %, 4.5 mole %, 4.6 mole %, 4.7 mole %, 4.8 mole %, 4.9 mole %, 5.0 mole %, 5.1 mole %, 5.2 mole %, 5.3 mole %, 5.4 mole %, 5.5 mole %, 5.6 mole %, 5.7 mole %, 5.8 mole %, 5.9 mole %, 6.0 mole %, 6.1 mole %, 6.2 mole %, 6.3 mole %, 6.4 mole %, 6.5 mole %, 6.6 mole %, 6.7 mole %, 6.8 mole %, 6.9 mole %, 7.0 mole %, 7.1 mole %, 7.2 mole %, 7.3 mole %, 7.4 mole %, 7.5 mole %, 7.6 mole %, 7.7 mole %, 7.8 mole %, 7.9 mole %, or 8.0 mole %; from 0.3 mole % to: 0.4 mole %, 0.5 mole %, 0.6 mole %, 0.7 mole %, 0.8 mole %, 0.9 mole %, 1.0 mole %, 1.1 mole %, 1.2 mole %, 1.3 mole %, 1.4 mole %, 1.5 mole %, 1.6 mole %, 1.7 mole %, 1.8 mole %, 1.9 mole %, 2.0 mole %, 2.1 mole %, 2.2 mole %, 2.3 mole %, 2.4 mole %, 2.5 mole %, 2.6 mole %, 2.7 mole %, 2.8 mole %, 2.9 mole %, 3.0 mole %, 3.1 mole %, 3.2 mole %, 3.3 mole %, 3.4 mole %, 3.5 mole %, 3.6 mole %, 3.7 mole %, 3.8 mole %, 3.9 mole %, 4.0 mole %, 4.1 mole %, 4.2 mole %, 4.3 mole %, 4.4 mole %, 4.5 mole %, 4.6 mole %, 4.7 mole %, 4.8 mole %, 4.9 mole %, 5.0 mole %, 5.1 mole %, 5.2 mole %, 5.3 mole %, 5.4 mole %, 5.5 mole %, 5.6 mole %, 5.7 mole %, 5.8 mole %, 5.9 mole %, 6.0 mole %, 6.1 mole %, 6.2 mole %, 6.3 mole %, 6.4 mole %, 6.5 mole %, 6.6 mole %, 6.7 mole %, 6.8 mole %, 6.9 mole %, 7.0 mole %, 7.1 mole %, 7.2 mole %, 7.3 mole %, 7.4 mole %, 7.5 mole %, 7.6 mole %, 7.7 mole %, 7.8 mole %, 7.9 mole %, or 8.0 mole %; from 0.4 mole % to: 0.5 mole %, 0.6 mole %, 0.7 mole %, 0.8 mole %, 0.9 mole %, 1.0 mole %, 1.1 mole %, 1.2 mole %, 1.3 mole %, 1.4 mole %, 1.5 mole %, 1.6 mole %, 1.7 mole %, 1.8 mole %, 1.9 mole %, 2.0 mole %, 2.1 mole %, 2.2 mole %, 2.3 mole %, 2.4 mole %, 2.5 mole %, 2.6 mole %, 2.7 mole %, 2.8 mole %, 2.9 mole %, 3.0 mole %, 3.1 mole %, 3.2 mole %, 3.3 mole %, 3.4 mole %, 3.5 mole %, 3.6 mole %, 3.7 mole %, 3.8 mole %, 3.9 mole %, 4.0 mole %, 4.1 mole %, 4.2 mole %, 4.3 mole %, 4.4 mole %, 4.5 mole %, 4.6 mole %, 4.7 mole %, 4.8 mole %, 4.9 mole %, 5.0 mole %, 5.1 mole %, 5.2 mole %, 5.3 mole %, 5.4 mole %, 5.5 mole %, 5.6 mole %, 5.7 mole %, 5.8 mole %, 5.9 mole %, 6.0 mole %, 6.1 mole %, 6.2 mole %, 6.3 mole %, 6.4 mole %, 6.5 mole %, 6.6 mole %, 6.7 mole %, 6.8 mole %, 6.9 mole %, 7.0 mole %, 7.1 mole %, 7.2 mole %, 7.3 mole %, 7.4 mole %, 7.5 mole %, 7.6 mole %, 7.7 mole %, 7.8 mole %, 7.9 mole %, or 8.0 mole %; from 0.5 mole % to: 0.6 mole %, 0.7 mole %, 0.8 mole %, 0.9 mole %, 1.0 mole %, 1.1 mole %, 1.2 mole %, 1.3 mole %, 1.4 mole %, 1.5 mole %, 1.6 mole %, 1.7 mole %, 1.8 mole %, 1.9 mole %, 2.0 mole %, 2.1 mole %, 2.2 mole %, 2.3 mole %, 2.4 mole %, 2.5 mole %, 2.6 mole %, 2.7 mole %, 2.8 mole %, 2.9 mole %, 3.0 mole %, 3.1 mole %, 3.2 mole %, 3.3 mole %, 3.4 mole %, 3.5 mole %, 3.6 mole %, 3.7 mole %, 3.8 mole %, 3.9 mole %, 4.0 mole %, 4.1 mole %, 4.2 mole %, 4.3 mole %, 4.4 mole %, 4.5 mole %, 4.6 mole %, 4.7 mole %, 4.8 mole %, 4.9 mole %, 5.0 mole %, 5.1 mole %, 5.2 mole %, 5.3 mole %, 5.4 mole %, 5.5 mole %, 5.6 mole %, 5.7 mole %, 5.8 mole %, 5.9 mole %, 6.0 mole %, 6.1 mole %, 6.2 mole %, 6.3 mole %, 6.4 mole %, 6.5 mole %, 6.6 mole %, 6.7 mole %, 6.8 mole %, 6.9 mole %, 7.0 mole %, 7.1 mole %, 7.2 mole %, 7.3 mole %, 7.4 mole %, 7.5 mole %, 7.6 mole %, 7.7 mole %, 7.8 mole %, 7.9 mole %, or 8.0 mole %; from 0.6 mole % to: 0.7 mole %, 0.8 mole %, 0.9 mole %, 1.0 mole %, 1.1 mole %, 1.2 mole %, 1.3 mole %, 1.4 mole %, 1.5 mole %, 1.6 mole %, 1.7 mole %, 1.8 mole %, 1.9 mole %, 2.0 mole %, 2.1 mole %, 2.2 mole %, 2.3 mole %, 2.4 mole %, 2.5 mole %, 2.6 mole %, 2.7 mole %, 2.8 mole %, 2.9 mole %, 3.0 mole %, 3.1 mole %, 3.2 mole %, 3.3 mole %, 3.4 mole %, 3.5 mole %, 3.6 mole %, 3.7 mole %, 3.8 mole %, 3.9 mole %, 4.0 mole %, 4.1 mole %, 4.2 mole %, 4.3 mole %, 4.4 mole %, 4.5 mole %, 4.6 mole %, 4.7 mole %, 4.8 mole %, 4.9 mole %, 5.0 mole %, 5.1 mole %, 5.2 mole %, 5.3 mole %, 5.4 mole %, 5.5 mole %, 5.6 mole %, 5.7 mole %, 5.8 mole %, 5.9 mole %, 6.0 mole %, 6.1 mole %, 6.2 mole %, 6.3 mole %, 6.4 mole %, 6.5 mole %, 6.6 mole %, 6.7 mole %, 6.8 mole %, 6.9 mole %, 7.0 mole %, 7.1 mole %, 7.2 mole %, 7.3 mole %, 7.4 mole %, 7.5 mole %, 7.6 mole %, 7.7 mole %, 7.8 mole %, 7.9 mole %, or 8.0 mole %; from 0.7 mole % to: 0.8 mole %, 0.9 mole %, 1.0 mole %, 1.1 mole %, 1.2 mole %, 1.3 mole %, 1.4 mole %, 1.5 mole %, 1.6 mole %, 1.7 mole %, 1.8 mole %, 1.9 mole %, 2.0 mole %, 2.1 mole %, 2.2 mole %, 2.3 mole %, 2.4 mole %, 2.5 mole %, 2.6 mole %, 2.7 mole %, 2.8 mole %, 2.9 mole %, 3.0 mole %, 3.1 mole %, 3.2 mole %, 3.3 mole %, 3.4 mole %, 3.5 mole %, 3.6 mole %, 3.7 mole %, 3.8 mole %, 3.9 mole %, 4.0 mole %, 4.1 mole %, 4.2 mole %, 4.3 mole %, 4.4 mole %, 4.5 mole %, 4.6 mole %, 4.7 mole %, 4.8 mole %, 4.9 mole %, 5.0 mole %, 5.1 mole %, 5.2 mole %, 5.3 mole %, 5.4 mole %, 5.5 mole %, 5.6 mole %, 5.7 mole %, 5.8 mole %, 5.9 mole %, 6.0 mole %, 6.1 mole %, 6.2 mole %, 6.3 mole %, 6.4 mole %, 6.5 mole %, 6.6 mole %, 6.7 mole %, 6.8 mole %, 6.9 mole %, 7.0 mole %, 7.1 mole %, 7.2 mole %, 7.3 mole %, 7.4 mole %, 7.5 mole %, 7.6 mole %, 7.7 mole %, 7.8 mole %, 7.9 mole %, or 8.0 mole %; from 0.8 mole % to: 0.9 mole %, 1.0 mole %, 1.1 mole %, 1.2 mole %, 1.3 mole %, 1.4 mole %, 1.5 mole %, 1.6 mole %, 1.7 mole %, 1.8 mole %, 1.9 mole %, 2.0 mole %, 2.1 mole %, 2.2 mole %, 2.3 mole %, 2.4 mole %, 2.5 mole %, 2.6 mole %, 2.7 mole %, 2.8 mole %, 2.9 mole %, 3.0 mole %, 3.1 mole %, 3.2 mole %, 3.3 mole %, 3.4 mole %, 3.5 mole %, 3.6 mole %, 3.7 mole %, 3.8 mole %, 3.9 mole %, 4.0 mole %, 4.1 mole %, 4.2 mole %, 4.3 mole %, 4.4 mole %, 4.5 mole %, 4.6 mole %, 4.7 mole %, 4.8 mole %, 4.9 mole %, 5.0 mole %, 5.1 mole %, 5.2 mole %, 5.3 mole %, 5.4 mole %, 5.5 mole %, 5.6 mole %, 5.7 mole %, 5.8 mole %, 5.9 mole %, 6.0 mole %, 6.1 mole %, 6.2 mole %, 6.3 mole %, 6.4 mole %, 6.5 mole %, 6.6 mole %, 6.7 mole %, 6.8 mole %, 6.9 mole %, 7.0 mole %, 7.1 mole %, 7.2 mole %, 7.3 mole %, 7.4 mole %, 7.5 mole %, 7.6 mole %, 7.7 mole %, 7.8 mole %, 7.9 mole %, or 8.0 mole %; from 0.9 mole % to: 1.0 mole %, 1.1 mole %, 1.2 mole %, 1.3 mole %, 1.4 mole %, 1.5 mole %, 1.6 mole %, 1.7 mole %, 1.8 mole %, 1.9 mole %, 2.0 mole %, 2.1 mole %, 2.2 mole %, 2.3 mole %, 2.4 mole %, 2.5 mole %, 2.6 mole %, 2.7 mole %, 2.8 mole %, 2.9 mole %, 3.0 mole %, 3.1 mole %, 3.2 mole %, 3.3 mole %, 3.4 mole %, 3.5 mole %, 3.6 mole %, 3.7 mole %, 3.8 mole %, 3.9 mole %, 4.0 mole %, 4.1 mole %, 4.2 mole %, 4.3 mole %, 4.4 mole %, 4.5 mole %, 4.6 mole %, 4.7 mole %, 4.8 mole %, 4.9 mole %, 5.0 mole %, 5.1 mole %, 5.2 mole %, 5.3 mole %, 5.4 mole %, 5.5 mole %, 5.6 mole %, 5.7 mole %, 5.8 mole %, 5.9 mole %, 6.0 mole %, 6.1 mole %, 6.2 mole %, 6.3 mole %, 6.4 mole %, 6.5 mole %, 6.6 mole %, 6.7 mole %, 6.8 mole %, 6.9 mole %, 7.0 mole %, 7.1 mole %, 7.2 mole %, 7.3 mole %, 7.4 mole %, 7.5 mole %, 7.6 mole %, 7.7 mole %, 7.8 mole %, 7.9 mole %, or 8.0 mole %; from 1.0 mole % to: 1.1 mole %, 1.2 mole %, 1.3 mole %, 1.4 mole %, 1.5 mole %, 1.6 mole %, 1.7 mole %, 1.8 mole %, 1.9 mole %, 2.0 mole %, 2.1 mole %, 2.2 mole %, 2.3 mole %, 2.4 mole %, 2.5 mole %, 2.6 mole %, 2.7 mole %, 2.8 mole %, 2.9 mole %, 3.0 mole %, 3.1 mole %, 3.2 mole %, 3.3 mole %, 3.4 mole %, 3.5 mole %, 3.6 mole %, 3.7 mole %, 3.8 mole %, 3.9 mole %, 4.0 mole %, 4.1 mole %, 4.2 mole %, 4.3 mole %, 4.4 mole %, 4.5 mole %, 4.6 mole %, 4.7 mole %, 4.8 mole %, 4.9 mole %, 5.0 mole %, 5.1 mole %, 5.2 mole %, 5.3 mole %, 5.4 mole %, 5.5 mole %, 5.6 mole %, 5.7 mole %, 5.8 mole %, 5.9 mole %, 6.0 mole %, 6.1 mole %, 6.2 mole %, 6.3 mole %, 6.4 mole %, 6.5 mole %, 6.6 mole %, 6.7 mole %, 6.8 mole %, 6.9 mole %, 7.0 mole %, 7.1 mole %, 7.2 mole %, 7.3 mole %, 7.4 mole %, 7.5 mole %, 7.6 mole %, 7.7 mole %, 7.8 mole %, 7.9 mole %, or 8.0 mole %; from 1.1 mole % to: 1.2 mole %, 1.3 mole %, 1.4 mole %, 1.5 mole %, 1.6 mole %, 1.7 mole %, 1.8 mole %, 1.9 mole %, 2.0 mole %, 2.1 mole %, 2.2 mole %, 2.3 mole %, 2.4 mole %, 2.5 mole %, 2.6 mole %, 2.7 mole %, 2.8 mole %, 2.9 mole %, 3.0 mole %, 3.1 mole %, 3.2 mole %, 3.3 mole %, 3.4 mole %, 3.5 mole %, 3.6 mole %, 3.7 mole %, 3.8 mole %, 3.9 mole %, 4.0 mole %, 4.1 mole %, 4.2 mole %, 4.3 mole %, 4.4 mole %, 4.5 mole %, 4.6 mole %, 4.7 mole %, 4.8 mole %, 4.9 mole %, 5.0 mole %, 5.1 mole %, 5.2 mole %, 5.3 mole %, 5.4 mole %, 5.5 mole %, 5.6 mole %, 5.7 mole %, 5.8 mole %, 5.9 mole %, 6.0 mole %, 6.1 mole %, 6.2 mole %, 6.3 mole %, 6.4 mole %, 6.5 mole %, 6.6 mole %, 6.7 mole %, 6.8 mole %, 6.9 mole %, 7.0 mole %, 7.1 mole %, 7.2 mole %, 7.3 mole %, 7.4 mole %, 7.5 mole %, 7.6 mole %, 7.7 mole %, 7.8 mole %, 7.9 mole %, or 8.0 mole %; from 1.2 mole % to: 1.3 mole %, 1.4 mole %, 1.5 mole %, 1.6 mole %, 1.7 mole %, 1.8 mole %, 1.9 mole %, 2.0 mole %, 2.1 mole %, 2.2 mole %, 2.3 mole %, 2.4 mole %, 2.5 mole %, 2.6 mole %, 2.7 mole %, 2.8 mole %, 2.9 mole %, 3.0 mole %, 3.1 mole %, 3.2 mole %, 3.3 mole %, 3.4 mole %, 3.5 mole %, 3.6 mole %, 3.7 mole %, 3.8 mole %, 3.9 mole %, 4.0 mole %, 4.1 mole %, 4.2 mole %, 4.3 mole %, 4.4 mole %, 4.5 mole %, 4.6 mole %, 4.7 mole %, 4.8 mole %, 4.9 mole %, 5.0 mole %, 5.1 mole %, 5.2 mole %, 5.3 mole %, 5.4 mole %, 5.5 mole %, 5.6 mole %, 5.7 mole %, 5.8 mole %, 5.9 mole %, 6.0 mole %, 6.1 mole %, 6.2 mole %, 6.3 mole %, 6.4 mole %, 6.5 mole %, 6.6 mole %, 6.7 mole %, 6.8 mole %, 6.9 mole %, 7.0 mole %, 7.1 mole %, 7.2 mole %, 7.3 mole %, 7.4 mole %, 7.5 mole %, 7.6 mole %, 7.7 mole %, 7.8 mole %, 7.9 mole %, or 8.0 mole %; from 1.3 mole % to: 1.4 mole %, 1.5 mole %, 1.6 mole %, 1.7 mole %, 1.8 mole %, 1.9 mole %, 2.0 mole %, 2.1 mole %, 2.2 mole %, 2.3 mole %, 2.4 mole %, 2.5 mole %, 2.6 mole %, 2.7 mole %, 2.8 mole %, 2.9 mole %, 3.0 mole %, 3.1 mole %, 3.2 mole %, 3.3 mole %, 3.4 mole %, 3.5 mole %, 3.6 mole %, 3.7 mole %, 3.8 mole %, 3.9 mole %, 4.0 mole %, 4.1 mole %, 4.2 mole %, 4.3 mole %, 4.4 mole %, 4.5 mole %, 4.6 mole %, 4.7 mole %, 4.8 mole %, 4.9 mole %, 5.0 mole %, 5.1 mole %, 5.2 mole %, 5.3 mole %, 5.4 mole %, 5.5 mole %, 5.6 mole %, 5.7 mole %, 5.8 mole %, 5.9 mole %, 6.0 mole %, 6.1 mole %, 6.2 mole %, 6.3 mole %, 6.4 mole %, 6.5 mole %, 6.6 mole %, 6.7 mole %, 6.8 mole %, 6.9 mole %, 7.0 mole %, 7.1 mole %, 7.2 mole %, 7.3 mole %, 7.4 mole %, 7.5 mole %, 7.6 mole %, 7.7 mole %, 7.8 mole %, 7.9 mole %, or 8.0 mole %; from 1.4 mole % to: 1.5 mole %, 1.6 mole %, 1.7 mole %, 1.8 mole %, 1.9 mole %, 2.0 mole %, 2.1 mole %, 2.2 mole %, 2.3 mole %, 2.4 mole %, 2.5 mole %, 2.6 mole %, 2.7 mole %, 2.8 mole %, 2.9 mole %, 3.0 mole %, 3.1 mole %, 3.2 mole %, 3.3 mole %, 3.4 mole %, 3.5 mole %, 3.6 mole %, 3.7 mole %, 3.8 mole %, 3.9 mole %, 4.0 mole %, 4.1 mole %, 4.2 mole %, 4.3 mole %, 4.4 mole %, 4.5 mole %, 4.6 mole %, 4.7 mole %, 4.8 mole %, 4.9 mole %, 5.0 mole %, 5.1 mole %, 5.2 mole %, 5.3 mole %, 5.4 mole %, 5.5 mole %, 5.6 mole %, 5.7 mole %, 5.8 mole %, 5.9 mole %, 6.0 mole %, 6.1 mole %, 6.2 mole %, 6.3 mole %, 6.4 mole %, 6.5 mole %, 6.6 mole %, 6.7 mole %, 6.8 mole %, 6.9 mole %, 7.0 mole %, 7.1 mole %, 7.2 mole %, 7.3 mole %, 7.4 mole %, 7.5 mole %, 7.6 mole %, 7.7 mole %, 7.8 mole %, 7.9 mole %, or 8.0 mole %; from 1.5 mole % to: 1.6 mole %, 1.7 mole %, 1.8 mole %, 1.9 mole %, 2.0 mole %, 2.1 mole %, 2.2 mole %, 2.3 mole %, 2.4 mole %, 2.5 mole %, 2.6 mole %, 2.7 mole %, 2.8 mole %, 2.9 mole %, 3.0 mole %, 3.1 mole %, 3.2 mole %, 3.3 mole %, 3.4 mole %, 3.5 mole %, 3.6 mole %, 3.7 mole %, 3.8 mole %, 3.9 mole %, 4.0 mole %, 4.1 mole %, 4.2 mole %, 4.3 mole %, 4.4 mole %, 4.5 mole %, 4.6 mole %, 4.7 mole %, 4.8 mole %, 4.9 mole %, 5.0 mole %, 5.1 mole %, 5.2 mole %, 5.3 mole %, 5.4 mole %, 5.5 mole %, 5.6 mole %, 5.7 mole %, 5.8 mole %, 5.9 mole %, 6.0 mole %, 6.1 mole %, 6.2 mole %, 6.3 mole %, 6.4 mole %, 6.5 mole %, 6.6 mole %, 6.7 mole %, 6.8 mole %, 6.9 mole %, 7.0 mole %, 7.1 mole %, 7.2 mole %, 7.3 mole %, 7.4 mole %, 7.5 mole %, 7.6 mole %, 7.7 mole %, 7.8 mole %, 7.9 mole %, or 8.0 mole %; from 1.6 mole % to: 1.7 mole % to: 1.8 mole %, 1.9 mole %, 2.0 mole %, 2.1 mole %, 2.2 mole %, 2.3 mole %, 2.4 mole %, 2.5 mole %, 2.6 mole %, 2.7 mole %, 2.8 mole %, 2.9 mole %, 3.0 mole %, 3.1 mole %, 3.2 mole %, 3.3 mole %, 3.4 mole %, 3.5 mole %, 3.6 mole %, 3.7 mole %, 3.8 mole %, 3.9 mole %, 4.0 mole %, 4.1 mole %, 4.2 mole %, 4.3 mole %, 4.4 mole %, 4.5 mole %, 4.6 mole %, 4.7 mole %, 4.8 mole %, 4.9 mole %, 5.0 mole %, 5.1 mole %, 5.2 mole %, 5.3 mole %, 5.4 mole %, 5.5 mole %, 5.6 mole %, 5.7 mole %, 5.8 mole %, 5.9 mole %, 6.0 mole %, 6.1 mole %, 6.2 mole %, 6.3 mole %, 6.4 mole %, 6.5 mole %, 6.6 mole %, 6.7 mole %, 6.8 mole %, 6.9 mole %, 7.0 mole %, 7.1 mole %, 7.2 mole %, 7.3 mole %, 7.4 mole %, 7.5 mole %, 7.6 mole %, 7.7 mole %, 7.8 mole %, 7.9 mole %, or 8.0 mole %; from 1.7 mole % to: 1.8 mole %, 1.9 mole %, 2.0 mole %, 2.1 mole %, 2.2 mole %, 2.3 mole %, 2.4 mole %, 2.5 mole %, 2.6 mole %, 2.7 mole %, 2.8 mole %, 2.9 mole %, 3.0 mole %, 3.1 mole %, 3.2 mole %, 3.3 mole %, 3.4 mole %, 3.5 mole %, 3.6 mole %, 3.7 mole %, 3.8 mole %, 3.9 mole %, 4.0 mole %, 4.1 mole %, 4.2 mole %, 4.3 mole %, 4.4 mole %, 4.5 mole %, 4.6 mole %, 4.7 mole %, 4.8 mole %, 4.9 mole %, 5.0 mole %, 5.1 mole %, 5.2 mole %, 5.3 mole %, 5.4 mole %, 5.5 mole %, 5.6 mole %, 5.7 mole %, 5.8 mole %, 5.9 mole %, 6.0 mole %, 6.1 mole %, 6.2 mole %, 6.3 mole %, 6.4 mole %, 6.5 mole %, 6.6 mole %, 6.7 mole %, 6.8 mole %, 6.9 mole %, 7.0 mole %, 7.1 mole %, 7.2 mole %, 7.3 mole %, 7.4 mole %, 7.5 mole %, 7.6 mole %, 7.7 mole %, 7.8 mole %, 7.9 mole %, or 8.0 mole %; from 1.8 mole % to: 1.9 mole %, 2.0 mole %, 2.1 mole %, 2.2 mole %, 2.3 mole %, 2.4 mole %, 2.5 mole %, 2.6 mole %, 2.7 mole %, 2.8 mole %, 2.9 mole %, 3.0 mole %, 3.1 mole %, 3.2 mole %, 3.3 mole %, 3.4 mole %, 3.5 mole %, 3.6 mole %, 3.7 mole %, 3.8 mole %, 3.9 mole %, 4.0 mole %, 4.1 mole %, 4.2 mole %, 4.3 mole %, 4.4 mole %, 4.5 mole %, 4.6 mole %, 4.7 mole %, 4.8 mole %, 4.9 mole %, 5.0 mole %, 5.1 mole %, 5.2 mole %, 5.3 mole %, 5.4 mole %, 5.5 mole %, 5.6 mole %, 5.7 mole %, 5.8 mole %, 5.9 mole %, 6.0 mole %, 6.1 mole %, 6.2 mole %, 6.3 mole %, 6.4 mole %, 6.5 mole %, 6.6 mole %, 6.7 mole %, 6.8 mole %, 6.9 mole %, 7.0 mole %, 7.1 mole %, 7.2 mole %, 7.3 mole %, 7.4 mole %, 7.5 mole %, 7.6 mole %, 7.7 mole %, 7.8 mole %, 7.9 mole %, or 8.0 mole %; from 1.9 mole % to: 2.0 mole %, 2.1 mole %, 2.2 mole %, 2.3 mole %, 2.4 mole %, 2.5 mole %, 2.6 mole %, 2.7 mole %, 2.8 mole %, 2.9 mole %, 3.0 mole %, 3.1 mole %, 3.2 mole %, 3.3 mole %, 3.4 mole %, 3.5 mole %, 3.6 mole %, 3.7 mole %, 3.8 mole %, 3.9 mole %, 4.0 mole %, 4.1 mole %, 4.2 mole %, 4.3 mole %, 4.4 mole %, 4.5 mole %, 4.6 mole %, 4.7 mole %, 4.8 mole %, 4.9 mole %, 5.0 mole %, 5.1 mole %, 5.2 mole %, 5.3 mole %, 5.4 mole %, 5.5 mole %, 5.6 mole %, 5.7 mole %, 5.8 mole %, 5.9 mole %, 6.0 mole %, 6.1 mole %, 6.2 mole %, 6.3 mole %, 6.4 mole %, 6.5 mole %, 6.6 mole %, 6.7 mole %, 6.8 mole %, 6.9 mole %, 7.0 mole %, 7.1 mole %, 7.2 mole %, 7.3 mole %, 7.4 mole %, 7.5 mole %, 7.6 mole %, 7.7 mole %, 7.8 mole %, 7.9 mole %, or 8.0 mole %; from 2.0 mole % to: 2.1 mole %, 2.2 mole %, 2.3 mole %, 2.4 mole %, 2.5 mole %, 2.6 mole %, 2.7 mole %, 2.8 mole %, 2.9 mole %, 3.0 mole %, 3.1 mole %, 3.2 mole %, 3.3 mole %, 3.4 mole %, 3.5 mole %, 3.6 mole %, 3.7 mole %, 3.8 mole %, 3.9 mole %, 4.0 mole %, 4.1 mole %, 4.2 mole %, 4.3 mole %, 4.4 mole %, 4.5 mole %, 4.6 mole %, 4.7 mole %, 4.8 mole %, 4.9 mole %, 5.0 mole %, 5.1 mole %, 5.2 mole %, 5.3 mole %, 5.4 mole %, 5.5 mole %, 5.6 mole %, 5.7 mole %, 5.8 mole %, 5.9 mole %, 6.0 mole %, 6.1 mole %, 6.2 mole %, 6.3 mole %, 6.4 mole %, 6.5 mole %, 6.6 mole %, 6.7 mole %, 6.8 mole %, 6.9 mole %, 7.0 mole %, 7.1 mole %, 7.2 mole %, 7.3 mole %, 7.4 mole %, 7.5 mole %, 7.6 mole %, 7.7 mole %, 7.8 mole %, 7.9 mole %, or 8.0 mole %; from 2.1 mole % to: 2.2 mole %, 2.3 mole %, 2.4 mole %, 2.5 mole %, 2.6 mole %, 2.7 mole %, 2.8 mole %, 2.9 mole %, 3.0 mole %, 3.1 mole %, 3.2 mole %, 3.3 mole %, 3.4 mole %, 3.5 mole %, 3.6 mole %, 3.7 mole %, 3.8 mole %, 3.9 mole %, 4.0 mole %, 4.1 mole %, 4.2 mole %, 4.3 mole %, 4.4 mole %, 4.5 mole %, 4.6 mole %, 4.7 mole %, 4.8 mole %, 4.9 mole %, 5.0 mole %, 5.1 mole %, 5.2 mole %, 5.3 mole %, 5.4 mole %, 5.5 mole %, 5.6 mole %, 5.7 mole %, 5.8 mole %, 5.9 mole %, 6.0 mole %, 6.1 mole %, 6.2 mole %, 6.3 mole %, 6.4 mole %, 6.5 mole %, 6.6 mole %, 6.7 mole %, 6.8 mole %, 6.9 mole %, 7.0 mole %, 7.1 mole %, 7.2 mole %, 7.3 mole %, 7.4 mole %, 7.5 mole %, 7.6 mole %, 7.7 mole %, 7.8 mole %, 7.9 mole %, or 8.0 mole %; from 2.2 mole % to: 2.3 mole %, 2.4 mole %, 2.5 mole %, 2.6 mole %, 2.7 mole %, 2.8 mole %, 2.9 mole %, 3.0 mole %, 3.1 mole %, 3.2 mole %, 3.3 mole %, 3.4 mole %, 3.5 mole %, 3.6 mole %, 3.7 mole %, 3.8 mole %, 3.9 mole %, 4.0 mole %, 4.1 mole %, 4.2 mole %, 4.3 mole %, 4.4 mole %, 4.5 mole %, 4.6 mole %, 4.7 mole %, 4.8 mole %, 4.9 mole %, 5.0 mole %, 5.1 mole %, 5.2 mole %, 5.3 mole %, 5.4 mole %, 5.5 mole %, 5.6 mole %, 5.7 mole %, 5.8 mole %, 5.9 mole %, 6.0 mole %, 6.1 mole %, 6.2 mole %, 6.3 mole %, 6.4 mole %, 6.5 mole %, 6.6 mole %, 6.7 mole %, 6.8 mole %, 6.9 mole %, 7.0 mole %, 7.1 mole %, 7.2 mole %, 7.3 mole %, 7.4 mole %, 7.5 mole %, 7.6 mole %, 7.7 mole %, 7.8 mole %, 7.9 mole %, or 8.0 mole %; from 2.3 mole % to: 2.4 mole %, 2.5 mole %, 2.6 mole %, 2.7 mole %, 2.8 mole %, 2.9 mole %, 3.0 mole %, 3.1 mole %, 3.2 mole %, 3.3 mole %, 3.4 mole %, 3.5 mole %, 3.6 mole %, 3.7 mole %, 3.8 mole %, 3.9 mole %, 4.0 mole %, 4.1 mole %, 4.2 mole %, 4.3 mole %, 4.4 mole %, 4.5 mole %, 4.6 mole %, 4.7 mole %, 4.8 mole %, 4.9 mole %, 5.0 mole %, 5.1 mole %, 5.2 mole %, 5.3 mole %, 5.4 mole %, 5.5 mole %, 5.6 mole %, 5.7 mole %, 5.8 mole %, 5.9 mole %, 6.0 mole %, 6.1 mole %, 6.2 mole %, 6.3 mole %, 6.4 mole %, 6.5 mole %, 6.6 mole %, 6.7 mole %, 6.8 mole %, 6.9 mole %, 7.0 mole %, 7.1 mole %, 7.2 mole %, 7.3 mole %, 7.4 mole %, 7.5 mole %, 7.6 mole %, 7.7 mole %, 7.8 mole %, 7.9 mole %, or 8.0 mole %; from 2.4 mole % to: 2.5 mole %, 2.6 mole %, 2.7 mole %, 2.8 mole %, 2.9 mole %, 3.0 mole %, 3.1 mole %, 3.2 mole %, 3.3 mole %, 3.4 mole %, 3.5 mole %, 3.6 mole %, 3.7 mole %, 3.8 mole %, 3.9 mole %, 4.0 mole %, 4.1 mole %, 4.2 mole %, 4.3 mole %, 4.4 mole %, 4.5 mole %, 4.6 mole %, 4.7 mole %, 4.8 mole %, 4.9 mole %, 5.0 mole %, 5.1 mole %, 5.2 mole %, 5.3 mole %, 5.4 mole %, 5.5 mole %, 5.6 mole %, 5.7 mole %, 5.8 mole %, 5.9 mole %, 6.0 mole %, 6.1 mole %, 6.2 mole %, 6.3 mole %, 6.4 mole %, 6.5 mole %, 6.6 mole %, 6.7 mole %, 6.8 mole %, 6.9 mole %, 7.0 mole %, 7.1 mole %, 7.2 mole %, 7.3 mole %, 7.4 mole %, 7.5 mole %, 7.6 mole %, 7.7 mole %, 7.8 mole %, 7.9 mole %, or 8.0 mole %; from 2.5 mole % to: 2.6 mole %, 2.7 mole %, 2.8 mole %, 2.9 mole %, 3.0 mole %, 3.1 mole %, 3.2 mole %, 3.3 mole %, 3.4 mole %, 3.5 mole %, 3.6 mole %, 3.7 mole %, 3.8 mole %, 3.9 mole %, 4.0 mole %, 4.1 mole %, 4.2 mole %, 4.3 mole %, 4.4 mole %, 4.5 mole %, 4.6 mole %, 4.7 mole %, 4.8 mole %, 4.9 mole %, 5.0 mole %, 5.1 mole %, 5.2 mole %, 5.3 mole %, 5.4 mole %, 5.5 mole %, 5.6 mole %, 5.7 mole %, 5.8 mole %, 5.9 mole %, 6.0 mole %, 6.1 mole %, 6.2 mole %, 6.3 mole %, 6.4 mole %, 6.5 mole %, 6.6 mole %, 6.7 mole %, 6.8 mole %, 6.9 mole %, 7.0 mole %, 7.1 mole %, 7.2 mole %, 7.3 mole %, 7.4 mole %, 7.5 mole %, 7.6 mole %, 7.7 mole %, 7.8 mole %, 7.9 mole %, or 8.0 mole %; from 2.6 mole % to: 2.7 mole %, 2.8 mole %, 2.9 mole %, 3.0 mole %, 3.1 mole %, 3.2 mole %, 3.3 mole %, 3.4 mole %, 3.5 mole %, 3.6 mole %, 3.7 mole %, 3.8 mole %, 3.9 mole %, 4.0 mole %, 4.1 mole %, 4.2 mole %, 4.3 mole %, 4.4 mole %, 4.5 mole %, 4.6 mole %, 4.7 mole %, 4.8 mole %, 4.9 mole %, 5.0 mole %, 5.1 mole %, 5.2 mole %, 5.3 mole %, 5.4 mole %, 5.5 mole %, 5.6 mole %, 5.7 mole %, 5.8 mole %, 5.9 mole %, 6.0 mole %, 6.1 mole %, 6.2 mole %, 6.3 mole %, 6.4 mole %, 6.5 mole %, 6.6 mole %, 6.7 mole %, 6.8 mole %, 6.9 mole %, 7.0 mole %, 7.1 mole %, 7.2 mole %, 7.3 mole %, 7.4 mole %, 7.5 mole %, 7.6 mole %, 7.7 mole %, 7.8 mole %, 7.9 mole %, or 8.0 mole %; from 2.7 mole % to: 2.8 mole %, 2.9 mole %, 3.0 mole %, 3.1 mole %, 3.2 mole %, 3.3 mole %, 3.4 mole %, 3.5 mole %, 3.6 mole %, 3.7 mole %, 3.8 mole %, 3.9 mole %, 4.0 mole %, 4.1 mole %, 4.2 mole %, 4.3 mole %, 4.4 mole %, 4.5 mole %, 4.6 mole %, 4.7 mole %, 4.8 mole %, 4.9 mole %, 5.0 mole %, 5.1 mole %, 5.2 mole %, 5.3 mole %, 5.4 mole %, 5.5 mole %, 5.6 mole %, 5.7 mole %, 5.8 mole %, 5.9 mole %, 6.0 mole %, 6.1 mole %, 6.2 mole %, 6.3 mole %, 6.4 mole %, 6.5 mole %, 6.6 mole %, 6.7 mole %, 6.8 mole %, 6.9 mole %, 7.0 mole %, 7.1 mole %, 7.2 mole %, 7.3 mole %, 7.4 mole %, 7.5 mole %, 7.6 mole %, 7.7 mole %, 7.8 mole %, 7.9 mole %, or 8.0 mole %; from 2.8 mole % to: 2.9 mole %, 3.0 mole %, 3.1 mole %, 3.2 mole %, 3.3 mole %, 3.4 mole %, 3.5 mole %, 3.6 mole %, 3.7 mole %, 3.8 mole %, 3.9 mole %, 4.0 mole %, 4.1 mole %, 4.2 mole %, 4.3 mole %, 4.4 mole %, 4.5 mole %, 4.6 mole %, 4.7 mole %, 4.8 mole %, 4.9 mole %, 5.0 mole %, 5.1 mole %, 5.2 mole %, 5.3 mole %, 5.4 mole %, 5.5 mole %, 5.6 mole %, 5.7 mole %, 5.8 mole %, 5.9 mole %, 6.0 mole %, 6.1 mole %, 6.2 mole %, 6.3 mole %, 6.4 mole %, 6.5 mole %, 6.6 mole %, 6.7 mole %, 6.8 mole %, 6.9 mole %, 7.0 mole %, 7.1 mole %, 7.2 mole %, 7.3 mole %, 7.4 mole %, 7.5 mole %, 7.6 mole %, 7.7 mole %, 7.8 mole %, 7.9 mole %, or 8.0 mole %; from 2.9 mole % to: 3.0 mole %, 3.1 mole %, 3.2 mole %, 3.3 mole %, 3.4 mole %, 3.5 mole %, 3.6 mole %, 3.7 mole %, 3.8 mole %, 3.9 mole %, 4.0 mole %, 4.1 mole %, 4.2 mole %, 4.3 mole %, 4.4 mole %, 4.5 mole %, 4.6 mole %, 4.7 mole %, 4.8 mole %, 4.9 mole %, 5.0 mole %, 5.1 mole %, 5.2 mole %, 5.3 mole %, 5.4 mole %, 5.5 mole %, 5.6 mole %, 5.7 mole %, 5.8 mole %, 5.9 mole %, 6.0 mole %, 6.1 mole %, 6.2 mole %, 6.3 mole %, 6.4 mole %, 6.5 mole %, 6.6 mole %, 6.7 mole %, 6.8 mole %, 6.9 mole %, 7.0 mole %, 7.1 mole %, 7.2 mole %, 7.3 mole %, 7.4 mole %, 7.5 mole %, 7.6 mole %, 7.7 mole %, 7.8 mole %, 7.9 mole %, or 8.0 mole %; from 3.0 mole % to: 3.1 mole %, 3.2 mole %, 3.3 mole %, 3.4 mole %, 3.5 mole %, 3.6 mole %, 3.7 mole %, 3.8 mole %, 3.9 mole %, 4.0 mole %, 4.1 mole %, 4.2 mole %, 4.3 mole %, 4.4 mole %, 4.5 mole %, 4.6 mole %, 4.7 mole %, 4.8 mole %, 4.9 mole %, 5.0 mole %, 5.1 mole %, 5.2 mole %, 5.3 mole %, 5.4 mole %, 5.5 mole %, 5.6 mole %, 5.7 mole %, 5.8 mole %, 5.9 mole %, 6.0 mole %, 6.1 mole %, 6.2 mole %, 6.3 mole %, 6.4 mole %, 6.5 mole %, 6.6 mole %, 6.7 mole %, 6.8 mole %, 6.9 mole %, 7.0 mole %, 7.1 mole %, 7.2 mole %, 7.3 mole %, 7.4 mole %, 7.5 mole %, 7.6 mole %, 7.7 mole %, 7.8 mole %, 7.9 mole %, or 8.0 mole %; from 3.1 mole % to: 3.2 mole %, 3.3 mole %, 3.4 mole %, 3.5 mole %, 3.6 mole %, 3.7 mole %, 3.8 mole %, 3.9 mole %, 4.0 mole %, 4.1 mole %, 4.2 mole %, 4.3 mole %, 4.4 mole %, 4.5 mole %, 4.6 mole %, 4.7 mole %, 4.8 mole %, 4.9 mole %, 5.0 mole %, 5.1 mole %, 5.2 mole %, 5.3 mole %, 5.4 mole %, 5.5 mole %, 5.6 mole %, 5.7 mole %, 5.8 mole %, 5.9 mole %, 6.0 mole %, 6.1 mole %, 6.2 mole %, 6.3 mole %, 6.4 mole %, 6.5 mole %, 6.6 mole %, 6.7 mole %, 6.8 mole %, 6.9 mole %, 7.0 mole %, 7.1 mole %, 7.2 mole %, 7.3 mole %, 7.4 mole %, 7.5 mole %, 7.6 mole %, 7.7 mole %, 7.8 mole %, 7.9 mole %, or 8.0 mole %; from 3.2 mole % to: 3.3 mole %, 3.4 mole %, 3.5 mole %, 3.6 mole %, 3.7 mole %, 3.8 mole %, 3.9 mole %, 4.0 mole %, 4.1 mole %, 4.2 mole %, 4.3 mole %, 4.4 mole %, 4.5 mole %, 4.6 mole %, 4.7 mole %, 4.8 mole %, 4.9 mole %, 5.0 mole %, 5.1 mole %, 5.2 mole %, 5.3 mole %, 5.4 mole %, 5.5 mole %, 5.6 mole %, 5.7 mole %, 5.8 mole %, 5.9 mole %, 6.0 mole %, 6.1 mole %, 6.2 mole %, 6.3 mole %, 6.4 mole %, 6.5 mole %, 6.6 mole %, 6.7 mole %, 6.8 mole %, 6.9 mole %, 7.0 mole %, 7.1 mole %, 7.2 mole %, 7.3 mole %, 7.4 mole %, 7.5 mole %, 7.6 mole %, 7.7 mole %, 7.8 mole %, 7.9 mole %, or 8.0 mole %; from 3.3 mole % to: 3.4 mole %, 3.5 mole %, 3.6 mole %, 3.7 mole %, 3.8 mole %, 3.9 mole %, 4.0 mole %, 4.1 mole %, 4.2 mole %, 4.3 mole %, 4.4 mole %, 4.5 mole %, 4.6 mole %, 4.7 mole %, 4.8 mole %, 4.9 mole %, 5.0 mole %, 5.1 mole %, 5.2 mole %, 5.3 mole %, 5.4 mole %, 5.5 mole %, 5.6 mole %, 5.7 mole %, 5.8 mole %, 5.9 mole %, 6.0 mole %, 6.1 mole %, 6.2 mole %, 6.3 mole %, 6.4 mole %, 6.5 mole %, 6.6 mole %, 6.7 mole %, 6.8 mole %, 6.9 mole %, 7.0 mole %, 7.1 mole %, 7.2 mole %, 7.3 mole %, 7.4 mole %, 7.5 mole %, 7.6 mole %, 7.7 mole %, 7.8 mole %, 7.9 mole %, or 8.0 mole %; from 3.4 mole % to: 3.5 mole %, 3.6 mole %, 3.7 mole %, 3.8 mole %, 3.9 mole %, 4.0 mole %, 4.1 mole %, 4.2 mole %, 4.3 mole %, 4.4 mole %, 4.5 mole %, 4.6 mole %, 4.7 mole %, 4.8 mole %, 4.9 mole %, 5.0 mole %, 5.1 mole %, 5.2 mole %, 5.3 mole %, 5.4 mole %, 5.5 mole %, 5.6 mole %, 5.7 mole %, 5.8 mole %, 5.9 mole %, 6.0 mole %, 6.1 mole %, 6.2 mole %, 6.3 mole %, 6.4 mole %, 6.5 mole %, 6.6 mole %, 6.7 mole %, 6.8 mole %, 6.9 mole %, 7.0 mole %, 7.1 mole %, 7.2 mole %, 7.3 mole %, 7.4 mole %, 7.5 mole %, 7.6 mole %, 7.7 mole %, 7.8 mole %, 7.9 mole %, or 8.0 mole %; from 3.5 mole % to: 3.6 mole %, 3.7 mole %, 3.8 mole %, 3.9 mole %, 4.0 mole %, 4.1 mole %, 4.2 mole %, 4.3 mole %, 4.4 mole %, 4.5 mole %, 4.6 mole %, 4.7 mole %, 4.8 mole %, 4.9 mole %, 5.0 mole %, 5.1 mole %, 5.2 mole %, 5.3 mole %, 5.4 mole %, 5.5 mole %, 5.6 mole %, 5.7 mole %, 5.8 mole %, 5.9 mole %, 6.0 mole %, 6.1 mole %, 6.2 mole %, 6.3 mole %, 6.4 mole %, 6.5 mole %, 6.6 mole %, 6.7 mole %, 6.8 mole %, 6.9 mole %, 7.0 mole %, 7.1 mole %, 7.2 mole %, 7.3 mole %, 7.4 mole %, 7.5 mole %, 7.6 mole %, 7.7 mole %, 7.8 mole %, 7.9 mole %, or 8.0 mole %; from 3.6 mole % to: 3.7 mole %, 3.8 mole %, 3.9 mole %, 4.0 mole %, 4.1 mole %, 4.2 mole %, 4.3 mole %, 4.4 mole %, 4.5 mole %, 4.6 mole %, 4.7 mole %, 4.8 mole %, 4.9 mole %, 5.0 mole %, 5.1 mole %, 5.2 mole %, 5.3 mole %, 5.4 mole %, 5.5 mole %, 5.6 mole %, 5.7 mole %, 5.8 mole %, 5.9 mole %, 6.0 mole %, 6.1 mole %, 6.2 mole %, 6.3 mole %, 6.4 mole %, 6.5 mole %, 6.6 mole %, 6.7 mole %, 6.8 mole %, 6.9 mole %, 7.0 mole %, 7.1 mole %, 7.2 mole %, 7.3 mole %, 7.4 mole %, 7.5 mole %, 7.6 mole %, 7.7 mole %, 7.8 mole %, 7.9 mole %, or 8.0 mole %; from 3.7 mole % to: 3.8 mole %, 3.9 mole %, 4.0 mole %, 4.1 mole %, 4.2 mole %, 4.3 mole %, 4.4 mole %, 4.5 mole %, 4.6 mole %, 4.7 mole %, 4.8 mole %, 4.9 mole %, 5.0 mole %, 5.1 mole %, 5.2 mole %, 5.3 mole %, 5.4 mole %, 5.5 mole %, 5.6 mole %, 5.7 mole %, 5.8 mole %, 5.9 mole %, 6.0 mole %, 6.1 mole %, 6.2 mole %, 6.3 mole %, 6.4 mole %, 6.5 mole %, 6.6 mole %, 6.7 mole %, 6.8 mole %, 6.9 mole %, 7.0 mole %, 7.1 mole %, 7.2 mole %, 7.3 mole %, 7.4 mole %, 7.5 mole %, 7.6 mole %, 7.7 mole %, 7.8 mole %, 7.9 mole %, or 8.0 mole %; from 3.8 mole % to: 3.9 mole %, 4.0 mole %, 4.1 mole %, 4.2 mole %, 4.3 mole %, 4.4 mole %, 4.5 mole %, 4.6 mole %, 4.7 mole %, 4.8 mole %, 4.9 mole %, 5.0 mole %, 5.1 mole %, 5.2 mole %, 5.3 mole %, 5.4 mole %, 5.5 mole %, 5.6 mole %, 5.7 mole %, 5.8 mole %, 5.9 mole %, 6.0 mole %, 6.1 mole %, 6.2 mole %, 6.3 mole %, 6.4 mole %, 6.5 mole %, 6.6 mole %, 6.7 mole %, 6.8 mole %, 6.9 mole %, 7.0 mole %, 7.1 mole %, 7.2 mole %, 7.3 mole %, 7.4 mole %, 7.5 mole %, 7.6 mole %, 7.7 mole %, 7.8 mole %, 7.9 mole %, or 8.0 mole %; from 3.9 mole % to: 4.0 mole %, 4.1 mole %, 4.2 mole %, 4.3 mole %, 4.4 mole %, 4.5 mole %, 4.6 mole %, 4.7 mole %, 4.8 mole %, 4.9 mole %, 5.0 mole %, 5.1 mole %, 5.2 mole %, 5.3 mole %, 5.4 mole %, 5.5 mole %, 5.6 mole %, 5.7 mole %, 5.8 mole %, 5.9 mole %, 6.0 mole %, 6.1 mole %, 6.2 mole %, 6.3 mole %, 6.4 mole %, 6.5 mole %, 6.6 mole %, 6.7 mole %, 6.8 mole %, 6.9 mole %, 7.0 mole %, 7.1 mole %, 7.2 mole %, 7.3 mole %, 7.4 mole %, 7.5 mole %, 7.6 mole %, 7.7 mole %, 7.8 mole %, 7.9 mole %, or 8.0 mole %; from 4.0 mole % to: 4.1 mole %, 4.2 mole %, 4.3 mole %, 4.4 mole %, 4.5 mole %, 4.6 mole %, 4.7 mole %, 4.8 mole %, 4.9 mole %, 5.0 mole %, 5.1 mole %, 5.2 mole %, 5.3 mole %, 5.4 mole %, 5.5 mole %, 5.6 mole %, 5.7 mole %, 5.8 mole %, 5.9 mole %, 6.0 mole %, 6.1 mole %, 6.2 mole %, 6.3 mole %, 6.4 mole %, 6.5 mole %, 6.6 mole %, 6.7 mole %, 6.8 mole %, 6.9 mole %, 7.0 mole %, 7.1 mole %, 7.2 mole %, 7.3 mole %, 7.4 mole %, 7.5 mole %, 7.6 mole %, 7.7 mole %, 7.8 mole %, 7.9 mole %, or 8.0 mole %; from 4.1 mole % to: 4.1 mole %, 4.2 mole %, 4.3 mole %, 4.4 mole %, 4.5 mole %, 4.6 mole %, 4.7 mole %, 4.8 mole %, 4.9 mole %, 5.0 mole %, 5.1 mole %, 5.2 mole %, 5.3 mole %, 5.4 mole %, 5.5 mole %, 5.6 mole %, 5.7 mole %, 5.8 mole %, 5.9 mole %, 6.0 mole %, 6.1 mole %, 6.2 mole %, 6.3 mole %, 6.4 mole %, 6.5 mole %, 6.6 mole %, 6.7 mole %, 6.8 mole %, 6.9 mole %, 7.0 mole %, 7.1 mole %, 7.2 mole %, 7.3 mole %, 7.4 mole %, 7.5 mole %, 7.6 mole %, 7.7 mole %, 7.8 mole %, 7.9 mole %, or 8.0 mole %; from 4.2 mole % to: 4.3 mole %, 4.4 mole %, 4.5 mole %, 4.6 mole %, 4.7 mole %, 4.8 mole %, 4.9 mole %, 5.0 mole %, 5.1 mole %, 5.2 mole %, 5.3 mole %, 5.4 mole %, 5.5 mole %, 5.6 mole %, 5.7 mole %, 5.8 mole %, 5.9 mole %, 6.0 mole %, 6.1 mole %, 6.2 mole %, 6.3 mole %, 6.4 mole %, 6.5 mole %, 6.6 mole %, 6.7 mole %, 6.8 mole %, 6.9 mole %, 7.0 mole %, 7.1 mole %, 7.2 mole %, 7.3 mole %, 7.4 mole %, 7.5 mole %, 7.6 mole %, 7.7 mole %, 7.8 mole %, 7.9 mole %, or 8.0 mole %; from 4.3 mole % to: 4.4 mole %, 4.5 mole %, 4.6 mole %, 4.7 mole %, 4.8 mole %, 4.9 mole %, 5.0 mole %, 5.1 mole %, 5.2 mole %, 5.3 mole %, 5.4 mole %, 5.5 mole %, 5.6 mole %, 5.7 mole %, 5.8 mole %, 5.9 mole %, 6.0 mole %, 6.1 mole %, 6.2 mole %, 6.3 mole %, 6.4 mole %, 6.5 mole %, 6.6 mole %, 6.7 mole %, 6.8 mole %, 6.9 mole %, 7.0 mole %, 7.1 mole %, 7.2 mole %, 7.3 mole %, 7.4 mole %, 7.5 mole %, 7.6 mole %, 7.7 mole %, 7.8 mole %, 7.9 mole %, or 8.0 mole %; from 4.4 mole % to: 4.5 mole %, 4.6 mole %, 4.7 mole %, 4.8 mole %, 4.9 mole %, 5.0 mole %, 5.1 mole %, 5.2 mole %, 5.3 mole %, 5.4 mole %, 5.5 mole %, 5.6 mole %, 5.7 mole %, 5.8 mole %, 5.9 mole %, 6.0 mole %, 6.1 mole %, 6.2 mole %, 6.3 mole %, 6.4 mole %, 6.5 mole %, 6.6 mole %, 6.7 mole %, 6.8 mole %, 6.9 mole %, 7.0 mole %, 7.1 mole %, 7.2 mole %, 7.3 mole %, 7.4 mole %, 7.5 mole %, 7.6 mole %, 7.7 mole %, 7.8 mole %, 7.9 mole %, or 8.0 mole %; from 4.5 mole % to: 4.6 mole %, 4.7 mole %, 4.8 mole %, 4.9 mole %, 5.0 mole %, 5.1 mole %, 5.2 mole %, 5.3 mole %, 5.4 mole %, 5.5 mole %, 5.6 mole %, 5.7 mole %, 5.8 mole %, 5.9 mole %, 6.0 mole %, 6.1 mole %, 6.2 mole %, 6.3 mole %, 6.4 mole %, 6.5 mole %, 6.6 mole %, 6.7 mole %, 6.8 mole %, 6.9 mole %, 7.0 mole %, 7.1 mole %, 7.2 mole %, 7.3 mole %, 7.4 mole %, 7.5 mole %, 7.6 mole %, 7.7 mole %, 7.8 mole %, 7.9 mole %, or 8.0 mole %; from 4.6 mole % to: 4.7 mole %, 4.8 mole %, 4.9 mole %, 5.0 mole %, 5.1 mole %, 5.2 mole %, 5.3 mole %, 5.4 mole %, 5.5 mole %, 5.6 mole %, 5.7 mole %, 5.8 mole %, 5.9 mole %, 6.0 mole %, 6.1 mole %, 6.2 mole %, 6.3 mole %, 6.4 mole %, 6.5 mole %, 6.6 mole %, 6.7 mole %, 6.8 mole %, 6.9 mole %, 7.0 mole %, 7.1 mole %, 7.2 mole %, 7.3 mole %, 7.4 mole %, 7.5 mole %, 7.6 mole %, 7.7 mole %, 7.8 mole %, 7.9 mole %, or 8.0 mole %; from 4.7 mole % to: 4.8 mole %, 4.9 mole %, 5.0 mole %, 5.1 mole %, 5.2 mole %, 5.3 mole %, 5.4 mole %, 5.5 mole %, 5.6 mole %, 5.7 mole %, 5.8 mole %, 5.9 mole %, 6.0 mole %, 6.1 mole %, 6.2 mole %, 6.3 mole %, 6.4 mole %, 6.5 mole %, 6.6 mole %, 6.7 mole %, 6.8 mole %, 6.9 mole %, 7.0 mole %, 7.1 mole %, 7.2 mole %, 7.3 mole %, 7.4 mole %, 7.5 mole %, 7.6 mole %, 7.7 mole %, 7.8 mole %, 7.9 mole %, or 8.0 mole %; from 4.8 mole % to: 4.9 mole %, 5.0 mole %, 5.1 mole %, 5.2 mole %, 5.3 mole %, 5.4 mole %, 5.5 mole %, 5.6 mole %, 5.7 mole %, 5.8 mole %, 5.9 mole %, 6.0 mole %, 6.1 mole %, 6.2 mole %, 6.3 mole %, 6.4 mole %, 6.5 mole %, 6.6 mole %, 6.7 mole %, 6.8 mole %, 6.9 mole %, 7.0 mole %, 7.1 mole %, 7.2 mole %, 7.3 mole %, 7.4 mole %, 7.5 mole %, 7.6 mole %, 7.7 mole %, 7.8 mole %, 7.9 mole %, or 8.0 mole %; from 4.9 mole % to: 5.0 mole %, 5.1 mole %, 5.2 mole %, 5.3 mole %, 5.4 mole %, 5.5 mole %, 5.6 mole %, 5.7 mole %, 5.8 mole %, 5.9 mole %, 6.0 mole %, 6.1 mole %, 6.2 mole %, 6.3 mole %, 6.4 mole %, 6.5 mole %, 6.6 mole %, 6.7 mole %, 6.8 mole %, 6.9 mole %, 7.0 mole %, 7.1 mole %, 7.2 mole %, 7.3 mole %, 7.4 mole %, 7.5 mole %, 7.6 mole %, 7.7 mole %, 7.8 mole %, 7.9 mole %, or 8.0 mole %; from 5.0 mole % to: 5.1 mole %, 5.2 mole %, 5.3 mole %, 5.4 mole %, 5.5 mole %, 5.6 mole %, 5.7 mole %, 5.8 mole %, 5.9 mole %, 6.0 mole %, 6.1 mole %, 6.2 mole %, 6.3 mole %, 6.4 mole %, 6.5 mole %, 6.6 mole %, 6.7 mole %, 6.8 mole %, 6.9 mole %, 7.0 mole %, 7.1 mole %, 7.2 mole %, 7.3 mole %, 7.4 mole %, 7.5 mole %, 7.6 mole %, 7.7 mole %, 7.8 mole %, 7.9 mole %, or 8.0 mole %; from 5.1 mole % to: 5.2 mole %, 5.3 mole %, 5.4 mole %, 5.5 mole %, 5.6 mole %, 5.7 mole %, 5.8 mole %, 5.9 mole %, 6.0 mole %, 6.1 mole %, 6.2 mole %, 6.3 mole %, 6.4 mole %, 6.5 mole %, 6.6 mole %, 6.7 mole %, 6.8 mole %, 6.9 mole %, 7.0 mole %, 7.1 mole %, 7.2 mole %, 7.3 mole %, 7.4 mole %, 7.5 mole %, 7.6 mole %, 7.7 mole %, 7.8 mole %, 7.9 mole %, or 8.0 mole %; from 5.2 mole % to: 5.3 mole %, 5.4 mole %, 5.5 mole %, 5.6 mole %, 5.7 mole %, 5.8 mole %, 5.9 mole %, 6.0 mole %, 6.1 mole %, 6.2 mole %, 6.3 mole %, 6.4 mole %, 6.5 mole %, 6.6 mole %, 6.7 mole %, 6.8 mole %, 6.9 mole %, 7.0 mole %, 7.1 mole %, 7.2 mole %, 7.3 mole %, 7.4 mole %, 7.5 mole %, 7.6 mole %, 7.7 mole %, 7.8 mole %, 7.9 mole %, or 8.0 mole %; from 5.3 mole % to: 5.4 mole %, 5.5 mole %, 5.6 mole %, 5.7 mole %, 5.8 mole %, 5.9 mole %, 6.0 mole %, 6.1 mole %, 6.2 mole %, 6.3 mole %, 6.4 mole %, 6.5 mole %, 6.6 mole %, 6.7 mole %, 6.8 mole %, 6.9 mole %, 7.0 mole %, 7.1 mole %, 7.2 mole %, 7.3 mole %, 7.4 mole %, 7.5 mole %, 7.6 mole %, 7.7 mole %, 7.8 mole %, 7.9 mole %, or 8.0 mole %; from 5.4 mole % to: 5.5 mole %, 5.6 mole %, 5.7 mole %, 5.8 mole %, 5.9 mole %, 6.0 mole %, 6.1 mole %, 6.2 mole %, 6.3 mole %, 6.4 mole %, 6.5 mole %, 6.6 mole %, 6.7 mole %, 6.8 mole %, 6.9 mole %, 7.0 mole %, 7.1 mole %, 7.2 mole %, 7.3 mole %, 7.4 mole %, 7.5 mole %, 7.6 mole %, 7.7 mole %, 7.8 mole %, 7.9 mole %, or 8.0 mole %; from 5.5 mole % to: 5.6 mole %, 5.7 mole %, 5.8 mole %, 5.9 mole %, 6.0 mole %, 6.1 mole %, 6.2 mole %, 6.3 mole %, 6.4 mole %, 6.5 mole %, 6.6 mole %, 6.7 mole %, 6.8 mole %, 6.9 mole %, 7.0 mole %, 7.1 mole %, 7.2 mole %, 7.3 mole %, 7.4 mole %, 7.5 mole %, 7.6 mole %, 7.7 mole %, 7.8 mole %, 7.9 mole %, or 8.0 mole %; from 5.6 mole % to: 5.7 mole %, 5.8 mole %, 5.9 mole %, 6.0 mole %, 6.1 mole %, 6.2 mole %, 6.3 mole %, 6.4 mole %, 6.5 mole %, 6.6 mole %, 6.7 mole %, 6.8 mole %, 6.9 mole %, 7.0 mole %, 7.1 mole %, 7.2 mole %, 7.3 mole %, 7.4 mole %, 7.5 mole %, 7.6 mole %, 7.7 mole %, 7.8 mole %, 7.9 mole %, or 8.0 mole %; from 5.7 mole % to: 5.8 mole %, 5.9 mole %, 6.0 mole %, 6.1 mole %, 6.2 mole %, 6.3 mole %, 6.4 mole %, 6.5 mole %, 6.6 mole %, 6.7 mole %, 6.8 mole %, 6.9 mole %, 7.0 mole %, 7.1 mole %, 7.2 mole %, 7.3 mole %, 7.4 mole %, 7.5 mole %, 7.6 mole %, 7.7 mole %, 7.8 mole %, 7.9 mole %, or 8.0 mole %; from 5.8 mole % to: 5.9 mole %, 6.0 mole %, 6.1 mole %, 6.2 mole %, 6.3 mole %, 6.4 mole %, 6.5 mole %, 6.6 mole %, 6.7 mole %, 6.8 mole %, 6.9 mole %, 7.0 mole %, 7.1 mole %, 7.2 mole %, 7.3 mole %, 7.4 mole %, 7.5 mole %, 7.6 mole %, 7.7 mole %, 7.8 mole %, 7.9 mole %, or 8.0 mole %; from 5.9 mole % to: 6.0 mole %, 6.1 mole %, 6.2 mole %, 6.3 mole %, 6.4 mole %, 6.5 mole %, 6.6 mole %, 6.7 mole %, 6.8 mole %, 6.9 mole %, 7.0 mole %, 7.1 mole %, 7.2 mole %, 7.3 mole %, 7.4 mole %, 7.5 mole %, 7.6 mole %, 7.7 mole %, 7.8 mole %, 7.9 mole %, or 8.0 mole %; from 6.0 mole % to: 6.2 mole %, 6.3 mole %, 6.4 mole %, 6.5 mole %, 6.6 mole %, 6.7 mole %, 6.8 mole %, 6.9 mole %, 7.0 mole %, 7.1 mole %, 7.2 mole %, 7.3 mole %, 7.4 mole %, 7.5 mole %, 7.6 mole %, 7.7 mole %, 7.8 mole %, 7.9 mole %, or 8.0 mole %; from 6.1 mole % to: 6.2 mole %, 6.3 mole %, 6.4 mole %, 6.5 mole %, 6.6 mole %, 6.7 mole %, 6.8 mole %, 6.9 mole %, 7.0 mole %, 7.1 mole %, 7.2 mole %, 7.3 mole %, 7.4 mole %, 7.5 mole %, 7.6 mole %, 7.7 mole %, 7.8 mole %, 7.9 mole %, or 8.0 mole %; from 6.2 mole % to: 6.3 mole %, 6.4 mole %, 6.5 mole %, 6.6 mole %, 6.7 mole %, 6.8 mole %, 6.9 mole %, 7.0 mole %, 7.1 mole %, 7.2 mole %, 7.3 mole %, 7.4 mole %, 7.5 mole %, 7.6 mole %, 7.7 mole %, 7.8 mole %, 7.9 mole %, or 8.0 mole %; from 6.3 mole % to: 6.4 mole %, 6.5 mole %, 6.6 mole %, 6.7 mole %, 6.8 mole %, 6.9 mole %, 7.0 mole %, 7.1 mole %, 7.2 mole %, 7.3 mole %, 7.4 mole %, 7.5 mole %, 7.6 mole %, 7.7 mole %, 7.8 mole %, 7.9 mole %, or 8.0 mole %; from 6.4 mole % to: 6.5 mole %, 6.6 mole %, 6.7 mole %, 6.8 mole %, 6.9 mole %, 7.0 mole %, 7.1 mole %, 7.2 mole %, 7.3 mole %, 7.4 mole %, 7.5 mole %, 7.6 mole %, 7.7 mole %, 7.8 mole %, 7.9 mole %, or 8.0 mole %; from 6.5 mole % to: 6.6 mole %, 6.7 mole %, 6.8 mole %, 6.9 mole %, 7.0 mole %, 7.1 mole %, 7.2 mole %, 7.3 mole %, 7.4 mole %, 7.5 mole %, 7.6 mole %, 7.7 mole %, 7.8 mole %, 7.9 mole %, or 8.0 mole %; from 6.6 mole % to: 6.7 mole %, 6.8 mole %, 6.9 mole %, 7.0 mole %, 7.1 mole %, 7.2 mole %, 7.3 mole %, 7.4 mole %, 7.5 mole %, 7.6 mole %, 7.7 mole %, 7.8 mole %, 7.9 mole %, or 8.0 mole %; from 6.7 mole % to: 6.8 mole %, 6.9 mole %, 7.0 mole %, 7.1 mole %, 7.2 mole %, 7.3 mole %, 7.4 mole %, 7.5 mole %, 7.6 mole %, 7.7 mole %, 7.8 mole %, 7.9 mole %, or 8.0 mole %; from 6.8 mole % to: 6.9 mole %, 7.0 mole %, 7.1 mole %, 7.2 mole %, 7.3 mole %, 7.4 mole %, 7.5 mole %, 7.6 mole %, 7.7 mole %, 7.8 mole %, 7.9 mole %, or 8.0 mole %; from 6.9 mole % to: 7.0 mole %, 7.1 mole %, 7.2 mole %, 7.3 mole %, 7.4 mole %, 7.5 mole %, 7.6 mole %, 7.7 mole %, 7.8 mole %, 7.9 mole %, or 8.0 mole %; from 7.0 mole % to: 7.1 mole %, 7.2 mole %, 7.3 mole %, 7.4 mole %, 7.5 mole %, 7.6 mole %, 7.7 mole %, 7.8 mole %, 7.9 mole %, or 8.0 mole %; from 7.1 mole % to: 7.2 mole %, 7.3 mole %, 7.4 mole %, 7.5 mole %, 7.6 mole %, 7.7 mole %, 7.8 mole %, 7.9 mole %, or 8.0 mole %; from 7.2 mole % to: 7.3 mole %, 7.4 mole %, 7.5 mole %, 7.6 mole %, 7.7 mole %, 7.8 mole %, 7.9 mole %, or 8.0 mole %; from 7.3 mole % to: 7.4 mole %, 7.5 mole %, 7.6 mole %, 7.7 mole %, 7.8 mole %, 7.9 mole %, or 8.0 mole %; from 7.4 mole % to: 7.5 mole %, 7.6 mole %, 7.7 mole %, 7.8 mole %, 7.9 mole %, or 8.0 mole %; from 7.5 mole % to: 7.6 mole %, 7.7 mole %, 7.8 mole %, 7.9 mole %, or 8.0 mole %; from 7.6 mole % to: 7.7 mole %, 7.8 mole %, 7.9 mole %, or 8.0 mole %; from 7.7 mole % to: 7.8 mole %, 7.9 mole %, or 8.0 mole %; from 7.8 mole % to: 7.9 mole %, or 8.0 mole %; or from 7.9 mole % to 8.0 mole % of polymer-conjugated lipid. Also contemplated and supported are combinations of the above-noted “mole %” of “at least” or “mole %” of “no more than” with the mole % of polymer-conjugated lipid provided in the Examples section of this document. Also contemplated and supported are combinations of the mole % of the Example section of this document to provide a range (i.e. mole % from [the mole % of polymer-conjugated lipid of the lipids of the LNP formulation X₁ in the Examples] to [the mole % of polymer-conjugated lipid of the lipids of the LNP formulation X₂ in the Examples] wherein X₁ and X₂ represent any two exemplary LNP formulations of the Examples.

[0464] In some embodiments, the lipids in the LNP have, comprise, consist of, consist essentially of, or are at least 0.1 mole %, 0.2 mole %, 0.3 mole %, 0.4 mole %, 0.5 mole %, 0.6 mole %, 0.7 mole %, 0.8 mole %, 0.9 mole %, 1.0 mole %, 1.1 mole %, 1.2 mole %, 1.3 mole %, 1.4 mole %, 1.5 mole %, 1.6 mole %, 1.7 mole %, 1.8 mole %, 1.9 mole %, 2.0 mole %, 2.1 mole %, 2.2 mole %, 2.3 mole %, 2.4 mole %, 2.5 mole %, 2.6 mole %, 2.7 mole %, 2.8 mole %, 2.9 mole %, 3.0 mole %, 3.1 mole %, 3.2 mole %, 3.3 mole %, 3.4 mole %, 3.5 mole %, 3.6 mole %, 3.7 mole %, 3.8 mole %, 3.9 mole %, 4.0 mole %, 4.1 mole %, 4.2 mole %, 4.3 mole %, 4.4 mole %, 4.5 mole %, 4.6 mole %, 4.7 mole %, 4.8 mole %, 4.9 mole %, 5.0 mole %, 5.1 mole %, 5.2 mole %, 5.3 mole %, 5.4 mole %, 5.5 mole %, 5.6 mole %, 5.7 mole %, 5.8 mole %, 5.9 mole %, 6.0 mole %, 6.1 mole %, 6.2 mole %, 6.3 mole %, 6.4 mole %, 6.5 mole %, 6.6 mole %, 6.7 mole %, 6.8 mole %, 6.9 mole %, 7.0 mole %, 7.1 mole %, 7.2 mole %, 7.3 mole %, 7.4 mole %, 7.5 mole %, 7.6 mole %, 7.7 mole %, 7.8 mole %, 7.9 mole %, 8.0 mole %, 8.1 mole %, 8.2 mole %, 8.3 mole %, 8.4 mole %, 8.5 mole %, 8.6 mole %, 8.7 mole %, 8.8 mole %, 8.9 mole %, 9.0 mole %, 9.1 mole %, 9.2 mole %, 9.3 mole %, 9.4 mole %, 9.5 mole %, 9.6 mole %, 9.7 mole %, 9.8 mole %, 9.9 mole %, 10.0 mole %, 10.1 mole %, 10.2 mole %, 10.3 mole %, 10.4 mole %, 10.5 mole %, 10.6 mole %, 10.7 mole %, 10.8 mole %, 10.9 mole %, 11.0 mole %, 11.1 mole %, 11.2 mole %, 11.3 mole %, 11.4 mole %, 11.5 mole %, 11.6 mole %, 11.7 mole %, 11.8 mole %, 11.9 mole %, 12.0 mole %, 12.1 mole %, 12.2 mole %, 12.3 mole %, 12.4 mole %, 12.5 mole %, 12.6 mole %, 12.7 mole %, 12.8 mole %, 12.9 mole %, 12.0 mole %, 13.1 mole %, 13.2 mole %, 13.3 mole %, 13.4 mole %, 13.5 mole %, 13.6 mole %, 13.7 mole %, 13.8 mole %, 13.9 mole %, or 14.0 mole % of second lipid. In some embodiments, the lipids in the LNP have, comprise, consist of, consist essentially of, or are no more than 11.0 mole %, 10.9 mole %, 10.8 mole %, 10.7 mole %, 10.6 mole %, 10.5 mole %, 10.4 mole %, 10.3 mole %, 10.2 mole %, 10.1 mole %, 10.0 mole %, 9.9 mole %, 9.8 mole %, 9.7 mole %, 9.6 mole %, 9.5 mole %, 9.4 mole %, 9.3 mole %, 9.2 mole %, 9.1 mole %, 8.0 mole %, 7.9 mole %, 7.8 mole %, 7.7 mole %, 7.6 mole %, 7.5 mole %, 7.4 mole %, 7.3 mole %, 7.2 mole %, 7.1 mole %, 7.0 mole %, 6.9 mole %, 6.8 mole %, 6.7 mole %, 6.6 mole %, 6.5 mole %, 6.4 mole %, 6.3 mole %, 6.2 mole %, 6.1 mole %, 6.0 mole %, 5.9 mole %, 5.8 mole %, 5.7 mole %, 5.6 mole %, 5.5 mole %, 5.4 mole %, 5.3 mole %, 5.2 mole %, 5.1 mole %, 5.0 mole %, 4.9 mole %, 4.8 mole %, 4.7 mole %, 4.6 mole %, 4.5 mole %, 4.4 mole %, 4.3 mole %, 4.2 mole %, 4.1 mole %, 4.0 mole %, 3.9 mole %, 3.8 mole %, 3.7 mole %, 3.6 mole %, 3.5 mole %, 3.4 mole %, 3.3 mole %, 3.2 mole %, 3.1 mole %, 3.0 mole %, 2.9 mole %, 2.8 mole %, 2.7 mole %, 2.6 mole %, 2.5 mole %, 2.4 mole %, 2.3 mole %, 2.2 mole %, 2.1 mole %, 2.0 mole %, 1.9 mole %, 1.8 mole %, 1.7 mole %, 1.6 mole %, 1.5 mole %, 1.4 mole %, 1.3 mole %, 1.2 mole %, 1.1 mole %, 1.0 mole %, 0.9 mole %, 0.8 mole %, 0.7 mole %, 0.6 mole %, 0.5 mole %, 0.4 mole %, 0.3 mole %, 0.2 mole %, 0.1 mole %, or no mole % of second lipid. Taking the above-noted embodiments into account, it is contemplated and supported that any of the above-noted “mole %” of “at least” and any of the above-noted “mole %” of “no more than” may be combined to provide an enclosed range (i.e. the lipids comprise from 20 mole % to 60 mole % of second lipid). In some embodiments, the lipids in the LNP have, comprise, consist of, consist essentially of, or are from 0.1 mole % to: 0.2 mole %, 0.3 mole %, 0.4 mole %, 0.5 mole %, 0.6 mole %, 0.7 mole %, 0.8 mole %, 0.9 mole %, 1.0 mole %, 1.1 mole %, 1.2 mole %, 1.3 mole %, 1.4 mole %, 1.5 mole %, 1.6 mole %, 1.7 mole %, 1.8 mole %, 1.9 mole %, 2.0 mole %, 2.1 mole %, 2.2 mole %, 2.3 mole %, 2.4 mole %, 2.5 mole %, 2.6 mole %, 2.7 mole %, 2.8 mole %, 2.9 mole %, 3.0 mole %, 3.1 mole %, 3.2 mole %, 3.3 mole %, 3.4 mole %, 3.5 mole %, 3.6 mole %, 3.7 mole %, 3.8 mole %, 3.9 mole %, 4.0 mole %, 4.1 mole %, 4.2 mole %, 4.3 mole %, 4.4 mole %, 4.5 mole %, 4.6 mole %, 4.7 mole %, 4.8 mole %, 4.9 mole %, 5.0 mole %, 5.1 mole %, 5.2 mole %, 5.3 mole %, 5.4 mole %, 5.5 mole %, 5.6 mole %, 5.7 mole %, 5.8 mole %, 5.9 mole %, 6.0 mole %, 6.1 mole %, 6.2 mole %, 6.3 mole %, 6.4 mole %, 6.5 mole %, 6.6 mole %, 6.7 mole %, 6.8 mole %, 6.9 mole %, 7.0 mole %, 7.1 mole %, 7.2 mole %, 7.3 mole %, 7.4 mole %, 7.5 mole %, 7.6 mole %, 7.7 mole %, 7.8 mole %, 7.9 mole %, 8.0 mole %, 8.1 mole %, 8.2 mole %, 8.3 mole %, 8.4 mole %, 8.5 mole %, 8.6 mole %, 8.7 mole %, 8.8 mole %, 8.9 mole %, 9.0 mole %, 9.1 mole %, 9.2 mole %, 9.3 mole %, 9.4 mole %, 9.5 mole %, 9.6 mole %, 9.7 mole %, 9.8 mole %, 9.9 mole %, 10.0 mole %, 10.1 mole %, 10.2 mole %, 10.3 mole %, 10.4 mole %, 10.5 mole %, 10.6 mole %, 10.7 mole %, 10.8 mole %, 10.9 mole %, 11.0 mole %, 11.1 mole %, 11.2 mole %, 11.3 mole %, 11.4 mole %, 11.5 mole %, 11.6 mole %, 11.7 mole %, 11.8 mole %, 11.9 mole %, 12.0 mole %, 12.1 mole %, 12.2 mole %, 12.3 mole %, 12.4 mole %, 12.5 mole %, 12.6 mole %, 12.7 mole %, 12.8 mole %, 12.9 mole %, 12.0 mole %, 13.1 mole %, 13.2 mole %, 13.3 mole %, 13.4 mole %, 13.5 mole %, 13.6 mole %, 13.7 mole %, 13.8 mole %, 13.9 mole %, or 14.0 mole %; from 0.2 mole % to: 0.3 mole %, 0.4 mole %, 0.5 mole %, 0.6 mole %, 0.7 mole %, 0.8 mole %, 0.9 mole %, 1.0 mole %, 1.1 mole %, 1.2 mole %, 1.3 mole %, 1.4 mole %, 1.5 mole %, 1.6 mole %, 1.7 mole %, 1.8 mole %, 1.9 mole %, 2.0 mole %, 2.1 mole %, 2.2 mole %, 2.3 mole %, 2.4 mole %, 2.5 mole %, 2.6 mole %, 2.7 mole %, 2.8 mole %, 2.9 mole %, 3.0 mole %, 3.1 mole %, 3.2 mole %, 3.3 mole %, 3.4 mole %, 3.5 mole %, 3.6 mole %, 3.7 mole %, 3.8 mole %, 3.9 mole %, 4.0 mole %, 4.1 mole %, 4.2 mole %, 4.3 mole %, 4.4 mole %, 4.5 mole %, 4.6 mole %, 4.7 mole %, 4.8 mole %, 4.9 mole %, 5.0 mole %, 5.1 mole %, 5.2 mole %, 5.3 mole %, 5.4 mole %, 5.5 mole %, 5.6 mole %, 5.7 mole %, 5.8 mole %, 5.9 mole %, 6.0 mole %, 6.1 mole %, 6.2 mole %, 6.3 mole %, 6.4 mole %, 6.5 mole %, 6.6 mole %, 6.7 mole %, 6.8 mole %, 6.9 mole %, 7.0 mole %, 7.1 mole %, 7.2 mole %, 7.3 mole %, 7.4 mole %, 7.5 mole %, 7.6 mole %, 7.7 mole %, 7.8 mole %, 7.9 mole %, 8.0 mole %, 8.1 mole %, 8.2 mole %, 8.3 mole %, 8.4 mole %, 8.5 mole %, 8.6 mole %, 8.7 mole %, 8.8 mole %, 8.9 mole %, 9.0 mole %, 9.1 mole %, 9.2 mole %, 9.3 mole %, 9.4 mole %, 9.5 mole %, 9.6 mole %, 9.7 mole %, 9.8 mole %, 9.9 mole %, 10.0 mole %, 10.1 mole %, 10.2 mole %, 10.3 mole %, 10.4 mole %, 10.5 mole %, 10.6 mole %, 10.7 mole %, 10.8 mole %, 10.9 mole %, 11.0 mole %, 11.1 mole %, 11.2 mole %, 11.3 mole %, 11.4 mole %, 11.5 mole %, 11.6 mole %, 11.7 mole %, 11.8 mole %, 11.9 mole %, 12.0 mole %, 12.1 mole %, 12.2 mole %, 12.3 mole %, 12.4 mole %, 12.5 mole %, 12.6 mole %, 12.7 mole %, 12.8 mole %, 12.9 mole %, 12.0 mole %, 13.1 mole %, 13.2 mole %, 13.3 mole %, 13.4 mole %, 13.5 mole %, 13.6 mole %, 13.7 mole %, 13.8 mole %, 13.9 mole %, or 14.0 mole %; from 0.3 mole % to: 0.4 mole %, 0.5 mole %, 0.6 mole %, 0.7 mole %, 0.8 mole %, 0.9 mole %, 1.0 mole %, 1.1 mole %, 1.2 mole %, 1.3 mole %, 1.4 mole %, 1.5 mole %, 1.6 mole %, 1.7 mole %, 1.8 mole %, 1.9 mole %, 2.0 mole %, 2.1 mole %, 2.2 mole %, 2.3 mole %, 2.4 mole %, 2.5 mole %, 2.6 mole %, 2.7 mole %, 2.8 mole %, 2.9 mole %, 3.0 mole %, 3.1 mole %, 3.2 mole %, 3.3 mole %, 3.4 mole %, 3.5 mole %, 3.6 mole %, 3.7 mole %, 3.8 mole %, 3.9 mole %, 4.0 mole %, 4.1 mole %, 4.2 mole %, 4.3 mole %, 4.4 mole %, 4.5 mole %, 4.6 mole %, 4.7 mole %, 4.8 mole %, 4.9 mole %, 5.0 mole %, 5.1 mole %, 5.2 mole %, 5.3 mole %, 5.4 mole %, 5.5 mole %, 5.6 mole %, 5.7 mole %, 5.8 mole %, 5.9 mole %, 6.0 mole %, 6.1 mole %, 6.2 mole %, 6.3 mole %, 6.4 mole %, 6.5 mole %, 6.6 mole %, 6.7 mole %, 6.8 mole %, 6.9 mole %, 7.0 mole %, 7.1 mole %, 7.2 mole %, 7.3 mole %, 7.4 mole %, 7.5 mole %, 7.6 mole %, 7.7 mole %, 7.8 mole %, 7.9 mole %, 8.0 mole %, 8.1 mole %, 8.2 mole %, 8.3 mole %, 8.4 mole %, 8.5 mole %, 8.6 mole %, 8.7 mole %, 8.8 mole %, 8.9 mole %, 9.0 mole %, 9.1 mole %, 9.2 mole %, 9.3 mole %, 9.4 mole %, 9.5 mole %, 9.6 mole %, 9.7 mole %, 9.8 mole %, 9.9 mole %, 10.0 mole %, 10.1 mole %, 10.2 mole %, 10.3 mole %, 10.4 mole %, 10.5 mole %, 10.6 mole %, 10.7 mole %, 10.8 mole %, 10.9 mole %, 11.0 mole %, 11.1 mole %, 11.2 mole %, 11.3 mole %, 11.4 mole %, 11.5 mole %, 11.6 mole %, 11.7 mole %, 11.8 mole %, 11.9 mole %, 12.0 mole %, 12.1 mole %, 12.2 mole %, 12.3 mole %, 12.4 mole %, 12.5 mole %, 12.6 mole %, 12.7 mole %, 12.8 mole %, 12.9 mole %, 12.0 mole %, 13.1 mole %, 13.2 mole %, 13.3 mole %, 13.4 mole %, 13.5 mole %, 13.6 mole %, 13.7 mole %, 13.8 mole %, 13.9 mole %, or 14.0 mole %; from 0.4 mole % to: 0.5 mole %, 0.6 mole %, 0.7 mole %, 0.8 mole %, 0.9 mole %, 1.0 mole %, 1.1 mole %, 1.2 mole %, 1.3 mole %, 1.4 mole %, 1.5 mole %, 1.6 mole %, 1.7 mole %, 1.8 mole %, 1.9 mole %, 2.0 mole %, 2.1 mole %, 2.2 mole %, 2.3 mole %, 2.4 mole %, 2.5 mole %, 2.6 mole %, 2.7 mole %, 2.8 mole %, 2.9 mole %, 3.0 mole %, 3.1 mole %, 3.2 mole %, 3.3 mole %, 3.4 mole %, 3.5 mole %, 3.6 mole %, 3.7 mole %, 3.8 mole %, 3.9 mole %, 4.0 mole %, 4.1 mole %, 4.2 mole %, 4.3 mole %, 4.4 mole %, 4.5 mole %, 4.6 mole %, 4.7 mole %, 4.8 mole %, 4.9 mole %, 5.0 mole %, 5.1 mole %, 5.2 mole %, 5.3 mole %, 5.4 mole %, 5.5 mole %, 5.6 mole %, 5.7 mole %, 5.8 mole %, 5.9 mole %, 6.0 mole %, 6.1 mole %, 6.2 mole %, 6.3 mole %, 6.4 mole %, 6.5 mole %, 6.6 mole %, 6.7 mole %, 6.8 mole %, 6.9 mole %, 7.0 mole %, 7.1 mole %, 7.2 mole %, 7.3 mole %, 7.4 mole %, 7.5 mole %, 7.6 mole %, 7.7 mole %, 7.8 mole %, 7.9 mole %, 8.0 mole %, 8.1 mole %, 8.2 mole %, 8.3 mole %, 8.4 mole %, 8.5 mole %, 8.6 mole %, 8.7 mole %, 8.8 mole %, 8.9 mole %, 9.0 mole %, 9.1 mole %, 9.2 mole %, 9.3 mole %, 9.4 mole %, 9.5 mole %, 9.6 mole %, 9.7 mole %, 9.8 mole %, 9.9 mole %, 10.0 mole %, 10.1 mole %, 10.2 mole %, 10.3 mole %, 10.4 mole %, 10.5 mole %, 10.6 mole %, 10.7 mole %, 10.8 mole %, 10.9 mole %, 11.0 mole %, 11.1 mole %, 11.2 mole %, 11.3 mole %, 11.4 mole %, 11.5 mole %, 11.6 mole %, 11.7 mole %, 11.8 mole %, 11.9 mole %, 12.0 mole %, 12.1 mole %, 12.2 mole %, 12.3 mole %, 12.4 mole %, 12.5 mole %, 12.6 mole %, 12.7 mole %, 12.8 mole %, 12.9 mole %, 12.0 mole %, 13.1 mole %, 13.2 mole %, 13.3 mole %, 13.4 mole %, 13.5 mole %, 13.6 mole %, 13.7 mole %, 13.8 mole %, 13.9 mole %, or 14.0 mole %; from 0.5 mole % to: 0.6 mole %, 0.7 mole %, 0.8 mole %, 0.9 mole %, 1.0 mole %, 1.1 mole %, 1.2 mole %, 1.3 mole %, 1.4 mole %, 1.5 mole %, 1.6 mole %, 1.7 mole %, 1.8 mole %, 1.9 mole %, 2.0 mole %, 2.1 mole %, 2.2 mole %, 2.3 mole %, 2.4 mole %, 2.5 mole %, 2.6 mole %, 2.7 mole %, 2.8 mole %, 2.9 mole %, 3.0 mole %, 3.1 mole %, 3.2 mole %, 3.3 mole %, 3.4 mole %, 3.5 mole %, 3.6 mole %, 3.7 mole %, 3.8 mole %, 3.9 mole %, 4.0 mole %, 4.1 mole %, 4.2 mole %, 4.3 mole %, 4.4 mole %, 4.5 mole %, 4.6 mole %, 4.7 mole %, 4.8 mole %, 4.9 mole %, 5.0 mole %, 5.1 mole %, 5.2 mole %, 5.3 mole %, 5.4 mole %, 5.5 mole %, 5.6 mole %, 5.7 mole %, 5.8 mole %, 5.9 mole %, 6.0 mole %, 6.1 mole %, 6.2 mole %, 6.3 mole %, 6.4 mole %, 6.5 mole %, 6.6 mole %, 6.7 mole %, 6.8 mole %, 6.9 mole %, 7.0 mole %, 7.1 mole %, 7.2 mole %, 7.3 mole %, 7.4 mole %, 7.5 mole %, 7.6 mole %, 7.7 mole %, 7.8 mole %, 7.9 mole %, 8.0 mole %, 8.1 mole %, 8.2 mole %, 8.3 mole %, 8.4 mole %, 8.5 mole %, 8.6 mole %, 8.7 mole %, 8.8 mole %, 8.9 mole %, 9.0 mole %, 9.1 mole %, 9.2 mole %, 9.3 mole %, 9.4 mole %, 9.5 mole %, 9.6 mole %, 9.7 mole %, 9.8 mole %, 9.9 mole %, 10.0 mole %, 10.1 mole %, 10.2 mole %, 10.3 mole %, 10.4 mole %, 10.5 mole %, 10.6 mole %, 10.7 mole %, 10.8 mole %, 10.9 mole %, 11.0 mole %, 11.1 mole %, 11.2 mole %, 11.3 mole %, 11.4 mole %, 11.5 mole %, 11.6 mole %, 11.7 mole %, 11.8 mole %, 11.9 mole %, 12.0 mole %, 12.1 mole %, 12.2 mole %, 12.3 mole %, 12.4 mole %, 12.5 mole %, 12.6 mole %, 12.7 mole %, 12.8 mole %, 12.9 mole %, 12.0 mole %, 13.1 mole %, 13.2 mole %, 13.3 mole %, 13.4 mole %, 13.5 mole %, 13.6 mole %, 13.7 mole %, 13.8 mole %, 13.9 mole %, or 14.0 mole %; from 0.6 mole % to: 0.7 mole %, 0.8 mole %, 0.9 mole %, 1.0 mole %, 1.1 mole %, 1.2 mole %, 1.3 mole %, 1.4 mole %, 1.5 mole %, 1.6 mole %, 1.7 mole %, 1.8 mole %, 1.9 mole %, 2.0 mole %, 2.1 mole %, 2.2 mole %, 2.3 mole %, 2.4 mole %, 2.5 mole %, 2.6 mole %, 2.7 mole %, 2.8 mole %, 2.9 mole %, 3.0 mole %, 3.1 mole %, 3.2 mole %, 3.3 mole %, 3.4 mole %, 3.5 mole %, 3.6 mole %, 3.7 mole %, 3.8 mole %, 3.9 mole %, 4.0 mole %, 4.1 mole %, 4.2 mole %, 4.3 mole %, 4.4 mole %, 4.5 mole %, 4.6 mole %, 4.7 mole %, 4.8 mole %, 4.9 mole %, 5.0 mole %, 5.1 mole %, 5.2 mole %, 5.3 mole %, 5.4 mole %, 5.5 mole %, 5.6 mole %, 5.7 mole %, 5.8 mole %, 5.9 mole %, 6.0 mole %, 6.1 mole %, 6.2 mole %, 6.3 mole %, 6.4 mole %, 6.5 mole %, 6.6 mole %, 6.7 mole %, 6.8 mole %, 6.9 mole %, 7.0 mole %, 7.1 mole %, 7.2 mole %, 7.3 mole %, 7.4 mole %, 7.5 mole %, 7.6 mole %, 7.7 mole %, 7.8 mole %, 7.9 mole %, 8.0 mole %, 8.1 mole %, 8.2 mole %, 8.3 mole %, 8.4 mole %, 8.5 mole %, 8.6 mole %, 8.7 mole %, 8.8 mole %, 8.9 mole %, 9.0 mole %, 9.1 mole %, 9.2 mole %, 9.3 mole %, 9.4 mole %, 9.5 mole %, 9.6 mole %, 9.7 mole %, 9.8 mole %, 9.9 mole %, 10.0 mole %, 10.1 mole %, 10.2 mole %, 10.3 mole %, 10.4 mole %, 10.5 mole %, 10.6 mole %, 10.7 mole %, 10.8 mole %, 10.9 mole %, 11.0 mole %, 11.1 mole %, 11.2 mole %, 11.3 mole %, 11.4 mole %, 11.5 mole %, 11.6 mole %, 11.7 mole %, 11.8 mole %, 11.9 mole %, 12.0 mole %, 12.1 mole %, 12.2 mole %, 12.3 mole %, 12.4 mole %, 12.5 mole %, 12.6 mole %, 12.7 mole %, 12.8 mole %, 12.9 mole %, 12.0 mole %, 13.1 mole %, 13.2 mole %, 13.3 mole %, 13.4 mole %, 13.5 mole %, 13.6 mole %, 13.7 mole %, 13.8 mole %, 13.9 mole %, or 14.0 mole %; from 0.7 mole % to: 0.8 mole %, 0.9 mole %, 1.0 mole %, 1.1 mole %, 1.2 mole %, 1.3 mole %, 1.4 mole %, 1.5 mole %, 1.6 mole %, 1.7 mole %, 1.8 mole %, 1.9 mole %, 2.0 mole %, 2.1 mole %, 2.2 mole %, 2.3 mole %, 2.4 mole %, 2.5 mole %, 2.6 mole %, 2.7 mole %, 2.8 mole %, 2.9 mole %, 3.0 mole %, 3.1 mole %, 3.2 mole %, 3.3 mole %, 3.4 mole %, 3.5 mole %, 3.6 mole %, 3.7 mole %, 3.8 mole %, 3.9 mole %, 4.0 mole %, 4.1 mole %, 4.2 mole %, 4.3 mole %, 4.4 mole %, 4.5 mole %, 4.6 mole %, 4.7 mole %, 4.8 mole %, 4.9 mole %, 5.0 mole %, 5.1 mole %, 5.2 mole %, 5.3 mole %, 5.4 mole %, 5.5 mole %, 5.6 mole %, 5.7 mole %, 5.8 mole %, 5.9 mole %, 6.0 mole %, 6.1 mole %, 6.2 mole %, 6.3 mole %, 6.4 mole %, 6.5 mole %, 6.6 mole %, 6.7 mole %, 6.8 mole %, 6.9 mole %, 7.0 mole %, 7.1 mole %, 7.2 mole %, 7.3 mole %, 7.4 mole %, 7.5 mole %, 7.6 mole %, 7.7 mole %, 7.8 mole %, 7.9 mole %, 8.0 mole %, 8.1 mole %, 8.2 mole %, 8.3 mole %, 8.4 mole %, 8.5 mole %, 8.6 mole %, 8.7 mole %, 8.8 mole %, 8.9 mole %, 9.0 mole %, 9.1 mole %, 9.2 mole %, 9.3 mole %, 9.4 mole %, 9.5 mole %, 9.6 mole %, 9.7 mole %, 9.8 mole %, 9.9 mole %, 10.0 mole %, 10.1 mole %, 10.2 mole %, 10.3 mole %, 10.4 mole %, 10.5 mole %, 10.6 mole %, 10.7 mole %, 10.8 mole %, 10.9 mole %, 11.0 mole %, 11.1 mole %, 11.2 mole %, 11.3 mole %, 11.4 mole %, 11.5 mole %, 11.6 mole %, 11.7 mole %, 11.8 mole %, 11.9 mole %, 12.0 mole %, 12.1 mole %, 12.2 mole %, 12.3 mole %, 12.4 mole %, 12.5 mole %, 12.6 mole %, 12.7 mole %, 12.8 mole %, 12.9 mole %, 12.0 mole %, 13.1 mole %, 13.2 mole %, 13.3 mole %, 13.4 mole %, 13.5 mole %, 13.6 mole %, 13.7 mole %, 13.8 mole %, 13.9 mole %, or 14.0 mole %; from 0.8 mole % to: 0.9 mole %, 1.0 mole %, 1.1 mole %, 1.2 mole %, 1.3 mole %, 1.4 mole %, 1.5 mole %, 1.6 mole %, 1.7 mole %, 1.8 mole %, 1.9 mole %, 2.0 mole %, 2.1 mole %, 2.2 mole %, 2.3 mole %, 2.4 mole %, 2.5 mole %, 2.6 mole %, 2.7 mole %, 2.8 mole %, 2.9 mole %, 3.0 mole %, 3.1 mole %, 3.2 mole %, 3.3 mole %, 3.4 mole %, 3.5 mole %, 3.6 mole %, 3.7 mole %, 3.8 mole %, 3.9 mole %, 4.0 mole %, 4.1 mole %, 4.2 mole %, 4.3 mole %, 4.4 mole %, 4.5 mole %, 4.6 mole %, 4.7 mole %, 4.8 mole %, 4.9 mole %, 5.0 mole %, 5.1 mole %, 5.2 mole %, 5.3 mole %, 5.4 mole %, 5.5 mole %, 5.6 mole %, 5.7 mole %, 5.8 mole %, 5.9 mole %, 6.0 mole %, 6.1 mole %, 6.2 mole %, 6.3 mole %, 6.4 mole %, 6.5 mole %, 6.6 mole %, 6.7 mole %, 6.8 mole %, 6.9 mole %, 7.0 mole %, 7.1 mole %, 7.2 mole %, 7.3 mole %, 7.4 mole %, 7.5 mole %, 7.6 mole %, 7.7 mole %, 7.8 mole %, 7.9 mole %, 8.0 mole %, 8.1 mole %, 8.2 mole %, 8.3 mole %, 8.4 mole %, 8.5 mole %, 8.6 mole %, 8.7 mole %, 8.8 mole %, 8.9 mole %, 9.0 mole %, 9.1 mole %, 9.2 mole %, 9.3 mole %, 9.4 mole %, 9.5 mole %, 9.6 mole %, 9.7 mole %, 9.8 mole %, 9.9 mole %, 10.0 mole %, 10.1 mole %, 10.2 mole %, 10.3 mole %, 10.4 mole %, 10.5 mole %, 10.6 mole %, 10.7 mole %, 10.8 mole %, 10.9 mole %, 11.0 mole %, 11.1 mole %, 11.2 mole %, 11.3 mole %, 11.4 mole %, 11.5 mole %, 11.6 mole %, 11.7 mole %, 11.8 mole %, 11.9 mole %, 12.0 mole %, 12.1 mole %, 12.2 mole %, 12.3 mole %, 12.4 mole %, 12.5 mole %, 12.6 mole %, 12.7 mole %, 12.8 mole %, 12.9 mole %, 12.0 mole %, 13.1 mole %, 13.2 mole %, 13.3 mole %, 13.4 mole %, 13.5 mole %, 13.6 mole %, 13.7 mole %, 13.8 mole %, 13.9 mole %, or 14.0 mole %; from 0.9 mole % to: 1.0 mole %, 1.1 mole %, 1.2 mole %, 1.3 mole %, 1.4 mole %, 1.5 mole %, 1.6 mole %, 1.7 mole %, 1.8 mole %, 1.9 mole %, 2.0 mole %, 2.1 mole %, 2.2 mole %, 2.3 mole %, 2.4 mole %, 2.5 mole %, 2.6 mole %, 2.7 mole %, 2.8 mole %, 2.9 mole %, 3.0 mole %, 3.1 mole %, 3.2 mole %, 3.3 mole %, 3.4 mole %, 3.5 mole %, 3.6 mole %, 3.7 mole %, 3.8 mole %, 3.9 mole %, 4.0 mole %, 4.1 mole %, 4.2 mole %, 4.3 mole %, 4.4 mole %, 4.5 mole %, 4.6 mole %, 4.7 mole %, 4.8 mole %, 4.9 mole %, 5.0 mole %, 5.1 mole %, 5.2 mole %, 5.3 mole %, 5.4 mole %, 5.5 mole %, 5.6 mole %, 5.7 mole %, 5.8 mole %, 5.9 mole %, 6.0 mole %, 6.1 mole %, 6.2 mole %, 6.3 mole %, 6.4 mole %, 6.5 mole %, 6.6 mole %, 6.7 mole %, 6.8 mole %, 6.9 mole %, 7.0 mole %, 7.1 mole %, 7.2 mole %, 7.3 mole %, 7.4 mole %, 7.5 mole %, 7.6 mole %, 7.7 mole %, 7.8 mole %, 7.9 mole %, 8.0 mole %, 8.1 mole %, 8.2 mole %, 8.3 mole %, 8.4 mole %, 8.5 mole %, 8.6 mole %, 8.7 mole %, 8.8 mole %, 8.9 mole %, 9.0 mole %, 9.1 mole %, 9.2 mole %, 9.3 mole %, 9.4 mole %, 9.5 mole %, 9.6 mole %, 9.7 mole %, 9.8 mole %, 9.9 mole %, 10.0 mole %, 10.1 mole %, 10.2 mole %, 10.3 mole %, 10.4 mole %, 10.5 mole %, 10.6 mole %, 10.7 mole %, 10.8 mole %, 10.9 mole %, 11.0 mole %, 11.1 mole %, 11.2 mole %, 11.3 mole %, 11.4 mole %, 11.5 mole %, 11.6 mole %, 11.7 mole %, 11.8 mole %, 11.9 mole %, 12.0 mole %, 12.1 mole %, 12.2 mole %, 12.3 mole %, 12.4 mole %, 12.5 mole %, 12.6 mole %, 12.7 mole %, 12.8 mole %, 12.9 mole %, 12.0 mole %, 13.1 mole %, 13.2 mole %, 13.3 mole %, 13.4 mole %, 13.5 mole %, 13.6 mole %, 13.7 mole %, 13.8 mole %, 13.9 mole %, or 14.0 mole %; from 1.0 mole % to: 1.1 mole %, 1.2 mole %, 1.3 mole %, 1.4 mole %, 1.5 mole %, 1.6 mole %, 1.7 mole %, 1.8 mole %, 1.9 mole %, 2.0 mole %, 2.1 mole %, 2.2 mole %, 2.3 mole %, 2.4 mole %, 2.5 mole %, 2.6 mole %, 2.7 mole %, 2.8 mole %, 2.9 mole %, 3.0 mole %, 3.1 mole %, 3.2 mole %, 3.3 mole %, 3.4 mole %, 3.5 mole %, 3.6 mole %, 3.7 mole %, 3.8 mole %, 3.9 mole %, 4.0 mole %, 4.1 mole %, 4.2 mole %, 4.3 mole %, 4.4 mole %, 4.5 mole %, 4.6 mole %, 4.7 mole %, 4.8 mole %, 4.9 mole %, 5.0 mole %, 5.1 mole %, 5.2 mole %, 5.3 mole %, 5.4 mole %, 5.5 mole %, 5.6 mole %, 5.7 mole %, 5.8 mole %, 5.9 mole %, 6.0 mole %, 6.1 mole %, 6.2 mole %, 6.3 mole %, 6.4 mole %, 6.5 mole %, 6.6 mole %, 6.7 mole %, 6.8 mole %, 6.9 mole %, 7.0 mole %, 7.1 mole %, 7.2 mole %, 7.3 mole %, 7.4 mole %, 7.5 mole %, 7.6 mole %, 7.7 mole %, 7.8 mole %, 7.9 mole %, 8.0 mole %, 8.1 mole %, 8.2 mole %, 8.3 mole %, 8.4 mole %, 8.5 mole %, 8.6 mole %, 8.7 mole %, 8.8 mole %, 8.9 mole %, 9.0 mole %, 9.1 mole %, 9.2 mole %, 9.3 mole %, 9.4 mole %, 9.5 mole %, 9.6 mole %, 9.7 mole %, 9.8 mole %, 9.9 mole %, 10.0 mole %, 10.1 mole %, 10.2 mole %, 10.3 mole %, 10.4 mole %, 10.5 mole %, 10.6 mole %, 10.7 mole %, 10.8 mole %, 10.9 mole %, 11.0 mole %, 11.1 mole %, 11.2 mole %, 11.3 mole %, 11.4 mole %, 11.5 mole %, 11.6 mole %, 11.7 mole %, 11.8 mole %, 11.9 mole %, 12.0 mole %, 12.1 mole %, 12.2 mole %, 12.3 mole %, 12.4 mole %, 12.5 mole %, 12.6 mole %, 12.7 mole %, 12.8 mole %, 12.9 mole %, 12.0 mole %, 13.1 mole %, 13.2 mole %, 13.3 mole %, 13.4 mole %, 13.5 mole %, 13.6 mole %, 13.7 mole %, 13.8 mole %, 13.9 mole %, or 14.0 mole %; from 1.1 mole % to: 1.2 mole %, 1.3 mole %, 1.4 mole %, 1.5 mole %, 1.6 mole %, 1.7 mole %, 1.8 mole %, 1.9 mole %, 2.0 mole %, 2.1 mole %, 2.2 mole %, 2.3 mole %, 2.4 mole %, 2.5 mole %, 2.6 mole %, 2.7 mole %, 2.8 mole %, 2.9 mole %, 3.0 mole %, 3.1 mole %, 3.2 mole %, 3.3 mole %, 3.4 mole %, 3.5 mole %, 3.6 mole %, 3.7 mole %, 3.8 mole %, 3.9 mole %, 4.0 mole %, 4.1 mole %, 4.2 mole %, 4.3 mole %, 4.4 mole %, 4.5 mole %, 4.6 mole %, 4.7 mole %, 4.8 mole %, 4.9 mole %, 5.0 mole %, 5.1 mole %, 5.2 mole %, 5.3 mole %, 5.4 mole %, 5.5 mole %, 5.6 mole %, 5.7 mole %, 5.8 mole %, 5.9 mole %, 6.0 mole %, 6.1 mole %, 6.2 mole %, 6.3 mole %, 6.4 mole %, 6.5 mole %, 6.6 mole %, 6.7 mole %, 6.8 mole %, 6.9 mole %, 7.0 mole %, 7.1 mole %, 7.2 mole %, 7.3 mole %, 7.4 mole %, 7.5 mole %, 7.6 mole %, 7.7 mole %, 7.8 mole %, 7.9 mole %, 8.0 mole %, 8.1 mole %, 8.2 mole %, 8.3 mole %, 8.4 mole %, 8.5 mole %, 8.6 mole %, 8.7 mole %, 8.8 mole %, 8.9 mole %, 9.0 mole %, 9.1 mole %, 9.2 mole %, 9.3 mole %, 9.4 mole %, 9.5 mole %, 9.6 mole %, 9.7 mole %, 9.8 mole %, 9.9 mole %, 10.0 mole %, 10.1 mole %, 10.2 mole %, 10.3 mole %, 10.4 mole %, 10.5 mole %, 10.6 mole %, 10.7 mole %, 10.8 mole %, 10.9 mole %, 11.0 mole %, 11.1 mole %, 11.2 mole %, 11.3 mole %, 11.4 mole %, 11.5 mole %, 11.6 mole %, 11.7 mole %, 11.8 mole %, 11.9 mole %, 12.0 mole %, 12.1 mole %, 12.2 mole %, 12.3 mole %, 12.4 mole %, 12.5 mole %, 12.6 mole %, 12.7 mole %, 12.8 mole %, 12.9 mole %, 12.0 mole %, 13.1 mole %, 13.2 mole %, 13.3 mole %, 13.4 mole %, 13.5 mole %, 13.6 mole %, 13.7 mole %, 13.8 mole %, 13.9 mole %, or 14.0 mole %; from 1.2 mole % to: 1.3 mole %, 1.4 mole %, 1.5 mole %, 1.6 mole %, 1.7 mole %, 1.8 mole %, 1.9 mole %, 2.0 mole %, 2.1 mole %, 2.2 mole %, 2.3 mole %, 2.4 mole %, 2.5 mole %, 2.6 mole %, 2.7 mole %, 2.8 mole %, 2.9 mole %, 3.0 mole %, 3.1 mole %, 3.2 mole %, 3.3 mole %, 3.4 mole %, 3.5 mole %, 3.6 mole %, 3.7 mole %, 3.8 mole %, 3.9 mole %, 4.0 mole %, 4.1 mole %, 4.2 mole %, 4.3 mole %, 4.4 mole %, 4.5 mole %, 4.6 mole %, 4.7 mole %, 4.8 mole %, 4.9 mole %, 5.0 mole %, 5.1 mole %, 5.2 mole %, 5.3 mole %, 5.4 mole %, 5.5 mole %, 5.6 mole %, 5.7 mole %, 5.8 mole %, 5.9 mole %, 6.0 mole %, 6.1 mole %, 6.2 mole %, 6.3 mole %, 6.4 mole %, 6.5 mole %, 6.6 mole %, 6.7 mole %, 6.8 mole %, 6.9 mole %, 7.0 mole %, 7.1 mole %, 7.2 mole %, 7.3 mole %, 7.4 mole %, 7.5 mole %, 7.6 mole %, 7.7 mole %, 7.8 mole %, 7.9 mole %, 8.0 mole %, 8.1 mole %, 8.2 mole %, 8.3 mole %, 8.4 mole %, 8.5 mole %, 8.6 mole %, 8.7 mole %, 8.8 mole %, 8.9 mole %, 9.0 mole %, 9.1 mole %, 9.2 mole %, 9.3 mole %, 9.4 mole %, 9.5 mole %, 9.6 mole %, 9.7 mole %, 9.8 mole %, 9.9 mole %, 10.0 mole %, 10.1 mole %, 10.2 mole %, 10.3 mole %, 10.4 mole %, 10.5 mole %, 10.6 mole %, 10.7 mole %, 10.8 mole %, 10.9 mole %, 11.0 mole %, 11.1 mole %, 11.2 mole %, 11.3 mole %, 11.4 mole %, 11.5 mole %, 11.6 mole %, 11.7 mole %, 11.8 mole %, 11.9 mole %, 12.0 mole %, 12.1 mole %, 12.2 mole %, 12.3 mole %, 12.4 mole %, 12.5 mole %, 12.6 mole %, 12.7 mole %, 12.8 mole %, 12.9 mole %, 12.0 mole %, 13.1 mole %, 13.2 mole %, 13.3 mole %, 13.4 mole %, 13.5 mole %, 13.6 mole %, 13.7 mole %, 13.8 mole %, 13.9 mole %, or 14.0 mole %; from 1.3 mole % to: 1.4 mole %, 1.5 mole %, 1.6 mole %, 1.7 mole %, 1.8 mole %, 1.9 mole %, 2.0 mole %, 2.1 mole %, 2.2 mole %, 2.3 mole %, 2.4 mole %, 2.5 mole %, 2.6 mole %, 2.7 mole %, 2.8 mole %, 2.9 mole %, 3.0 mole %, 3.1 mole %, 3.2 mole %, 3.3 mole %, 3.4 mole %, 3.5 mole %, 3.6 mole %, 3.7 mole %, 3.8 mole %, 3.9 mole %, 4.0 mole %, 4.1 mole %, 4.2 mole %, 4.3 mole %, 4.4 mole %, 4.5 mole %, 4.6 mole %, 4.7 mole %, 4.8 mole %, 4.9 mole %, 5.0 mole %, 5.1 mole %, 5.2 mole %, 5.3 mole %, 5.4 mole %, 5.5 mole %, 5.6 mole %, 5.7 mole %, 5.8 mole %, 5.9 mole %, 6.0 mole %, 6.1 mole %, 6.2 mole %, 6.3 mole %, 6.4 mole %, 6.5 mole %, 6.6 mole %, 6.7 mole %, 6.8 mole %, 6.9 mole %, 7.0 mole %, 7.1 mole %, 7.2 mole %, 7.3 mole %, 7.4 mole %, 7.5 mole %, 7.6 mole %, 7.7 mole %, 7.8 mole %, 7.9 mole %, 8.0 mole %, 8.1 mole %, 8.2 mole %, 8.3 mole %, 8.4 mole %, 8.5 mole %, 8.6 mole %, 8.7 mole %, 8.8 mole %, 8.9 mole %, 9.0 mole %, 9.1 mole %, 9.2 mole %, 9.3 mole %, 9.4 mole %, 9.5 mole %, 9.6 mole %, 9.7 mole %, 9.8 mole %, 9.9 mole %, 10.0 mole %, 10.1 mole %, 10.2 mole %, 10.3 mole %, 10.4 mole %, 10.5 mole %, 10.6 mole %, 10.7 mole %, 10.8 mole %, 10.9 mole %, 11.0 mole %, 11.1 mole %, 11.2 mole %, 11.3 mole %, 11.4 mole %, 11.5 mole %, 11.6 mole %, 11.7 mole %, 11.8 mole %, 11.9 mole %, 12.0 mole %, 12.1 mole %, 12.2 mole %, 12.3 mole %, 12.4 mole %, 12.5 mole %, 12.6 mole %, 12.7 mole %, 12.8 mole %, 12.9 mole %, 12.0 mole %, 13.1 mole %, 13.2 mole %, 13.3 mole %, 13.4 mole %, 13.5 mole %, 13.6 mole %, 13.7 mole %, 13.8 mole %, 13.9 mole %, or 14.0 mole %; from 1.4 mole % to: 1.5 mole %, 1.6 mole %, 1.7 mole %, 1.8 mole %, 1.9 mole %, 2.0 mole %, 2.1 mole %, 2.2 mole %, 2.3 mole %, 2.4 mole %, 2.5 mole %, 2.6 mole %, 2.7 mole %, 2.8 mole %, 2.9 mole %, 3.0 mole %, 3.1 mole %, 3.2 mole %, 3.3 mole %, 3.4 mole %, 3.5 mole %, 3.6 mole %, 3.7 mole %, 3.8 mole %, 3.9 mole %, 4.0 mole %, 4.1 mole %, 4.2 mole %, 4.3 mole %, 4.4 mole %, 4.5 mole %, 4.6 mole %, 4.7 mole %, 4.8 mole %, 4.9 mole %, 5.0 mole %, 5.1 mole %, 5.2 mole %, 5.3 mole %, 5.4 mole %, 5.5 mole %, 5.6 mole %, 5.7 mole %, 5.8 mole %, 5.9 mole %, 6.0 mole %, 6.1 mole %, 6.2 mole %, 6.3 mole %, 6.4 mole %, 6.5 mole %, 6.6 mole %, 6.7 mole %, 6.8 mole %, 6.9 mole %, 7.0 mole %, 7.1 mole %, 7.2 mole %, 7.3 mole %, 7.4 mole %, 7.5 mole %, 7.6 mole %, 7.7 mole %, 7.8 mole %, 7.9 mole %, 8.0 mole %, 8.1 mole %, 8.2 mole %, 8.3 mole %, 8.4 mole %, 8.5 mole %, 8.6 mole %, 8.7 mole %, 8.8 mole %, 8.9 mole %, 9.0 mole %, 9.1 mole %, 9.2 mole %, 9.3 mole %, 9.4 mole %, 9.5 mole %, 9.6 mole %, 9.7 mole %, 9.8 mole %, 9.9 mole %, 10.0 mole %, 10.1 mole %, 10.2 mole %, 10.3 mole %, 10.4 mole %, 10.5 mole %, 10.6 mole %, 10.7 mole %, 10.8 mole %, 10.9 mole %, 11.0 mole %, 11.1 mole %, 11.2 mole %, 11.3 mole %, 11.4 mole %, 11.5 mole %, 11.6 mole %, 11.7 mole %, 11.8 mole %, 11.9 mole %, 12.0 mole %, 12.1 mole %, 12.2 mole %, 12.3 mole %, 12.4 mole %, 12.5 mole %, 12.6 mole %, 12.7 mole %, 12.8 mole %, 12.9 mole %, 12.0 mole %, 13.1 mole %, 13.2 mole %, 13.3 mole %, 13.4 mole %, 13.5 mole %, 13.6 mole %, 13.7 mole %, 13.8 mole %, 13.9 mole %, or 14.0 mole %; from 1.5 mole % to: 1.6 mole %, 1.7 mole %, 1.8 mole %, 1.9 mole %, 2.0 mole %, 2.1 mole %, 2.2 mole %, 2.3 mole %, 2.4 mole %, 2.5 mole %, 2.6 mole %, 2.7 mole %, 2.8 mole %, 2.9 mole %, 3.0 mole %, 3.1 mole %, 3.2 mole %, 3.3 mole %, 3.4 mole %, 3.5 mole %, 3.6 mole %, 3.7 mole %, 3.8 mole %, 3.9 mole %, 4.0 mole %, 4.1 mole %, 4.2 mole %, 4.3 mole %, 4.4 mole %, 4.5 mole %, 4.6 mole %, 4.7 mole %, 4.8 mole %, 4.9 mole %, 5.0 mole %, 5.1 mole %, 5.2 mole %, 5.3 mole %, 5.4 mole %, 5.5 mole %, 5.6 mole %, 5.7 mole %, 5.8 mole %, 5.9 mole %, 6.0 mole %, 6.1 mole %, 6.2 mole %, 6.3 mole %, 6.4 mole %, 6.5 mole %, 6.6 mole %, 6.7 mole %, 6.8 mole %, 6.9 mole %, 7.0 mole %, 7.1 mole %, 7.2 mole %, 7.3 mole %, 7.4 mole %, 7.5 mole %, 7.6 mole %, 7.7 mole %, 7.8 mole %, 7.9 mole %, 8.0 mole %, 8.1 mole %, 8.2 mole %, 8.3 mole %, 8.4 mole %, 8.5 mole %, 8.6 mole %, 8.7 mole %, 8.8 mole %, 8.9 mole %, 9.0 mole %, 9.1 mole %, 9.2 mole %, 9.3 mole %, 9.4 mole %, 9.5 mole %, 9.6 mole %, 9.7 mole %, 9.8 mole %, 9.9 mole %, 10.0 mole %, 10.1 mole %, 10.2 mole %, 10.3 mole %, 10.4 mole %, 10.5 mole %, 10.6 mole %, 10.7 mole %, 10.8 mole %, 10.9 mole %, 11.0 mole %, 11.1 mole %, 11.2 mole %, 11.3 mole %, 11.4 mole %, 11.5 mole %, 11.6 mole %, 11.7 mole %, 11.8 mole %, 11.9 mole %, 12.0 mole %, 12.1 mole %, 12.2 mole %, 12.3 mole %, 12.4 mole %, 12.5 mole %, 12.6 mole %, 12.7 mole %, 12.8 mole %, 12.9 mole %, 12.0 mole %, 13.1 mole %, 13.2 mole %, 13.3 mole %, 13.4 mole %, 13.5 mole %, 13.6 mole %, 13.7 mole %, 13.8 mole %, 13.9 mole %, or 14.0 mole %; from 1.6 mole % to: 1.7 mole % to: 1.8 mole %, 1.9 mole %, 2.0 mole %, 2.1 mole %, 2.2 mole %, 2.3 mole %, 2.4 mole %, 2.5 mole %, 2.6 mole %, 2.7 mole %, 2.8 mole %, 2.9 mole %, 3.0 mole %, 3.1 mole %, 3.2 mole %, 3.3 mole %, 3.4 mole %, 3.5 mole %, 3.6 mole %, 3.7 mole %, 3.8 mole %, 3.9 mole %, 4.0 mole %, 4.1 mole %, 4.2 mole %, 4.3 mole %, 4.4 mole %, 4.5 mole %, 4.6 mole %, 4.7 mole %, 4.8 mole %, 4.9 mole %, 5.0 mole %, 5.1 mole %, 5.2 mole %, 5.3 mole %, 5.4 mole %, 5.5 mole %, 5.6 mole %, 5.7 mole %, 5.8 mole %, 5.9 mole %, 6.0 mole %, 6.1 mole %, 6.2 mole %, 6.3 mole %, 6.4 mole %, 6.5 mole %, 6.6 mole %, 6.7 mole %, 6.8 mole %, 6.9 mole %, 7.0 mole %, 7.1 mole %, 7.2 mole %, 7.3 mole %, 7.4 mole %, 7.5 mole %, 7.6 mole %, 7.7 mole %, 7.8 mole %, 7.9 mole %, or 8.0 mole %; from 1.7 mole % to: 1.8 mole %, 1.9 mole %, 2.0 mole %, 2.1 mole %, 2.2 mole %, 2.3 mole %, 2.4 mole %, 2.5 mole %, 2.6 mole %, 2.7 mole %, 2.8 mole %, 2.9 mole %, 3.0 mole %, 3.1 mole %, 3.2 mole %, 3.3 mole %, 3.4 mole %, 3.5 mole %, 3.6 mole %, 3.7 mole %, 3.8 mole %, 3.9 mole %, 4.0 mole %, 4.1 mole %, 4.2 mole %, 4.3 mole %, 4.4 mole %, 4.5 mole %, 4.6 mole %, 4.7 mole %, 4.8 mole %, 4.9 mole %, 5.0 mole %, 5.1 mole %, 5.2 mole %, 5.3 mole %, 5.4 mole %, 5.5 mole %, 5.6 mole %, 5.7 mole %, 5.8 mole %, 5.9 mole %, 6.0 mole %, 6.1 mole %, 6.2 mole %, 6.3 mole %, 6.4 mole %, 6.5 mole %, 6.6 mole %, 6.7 mole %, 6.8 mole %, 6.9 mole %, 7.0 mole %, 7.1 mole %, 7.2 mole %, 7.3 mole %, 7.4 mole %, 7.5 mole %, 7.6 mole %, 7.7 mole %, 7.8 mole %, 7.9 mole %, 8.0 mole %, 8.1 mole %, 8.2 mole %, 8.3 mole %, 8.4 mole %, 8.5 mole %, 8.6 mole %, 8.7 mole %, 8.8 mole %, 8.9 mole %, 9.0 mole %, 9.1 mole %, 9.2 mole %, 9.3 mole %, 9.4 mole %, 9.5 mole %, 9.6 mole %, 9.7 mole %, 9.8 mole %, 9.9 mole %, 10.0 mole %, 10.1 mole %, 10.2 mole %, 10.3 mole %, 10.4 mole %, 10.5 mole %, 10.6 mole %, 10.7 mole %, 10.8 mole %, 10.9 mole %, 11.0 mole %, 11.1 mole %, 11.2 mole %, 11.3 mole %, 11.4 mole %, 11.5 mole %, 11.6 mole %, 11.7 mole %, 11.8 mole %, 11.9 mole %, 12.0 mole %, 12.1 mole %, 12.2 mole %, 12.3 mole %, 12.4 mole %, 12.5 mole %, 12.6 mole %, 12.7 mole %, 12.8 mole %, 12.9 mole %, 12.0 mole %, 13.1 mole %, 13.2 mole %, 13.3 mole %, 13.4 mole %, 13.5 mole %, 13.6 mole %, 13.7 mole %, 13.8 mole %, 13.9 mole %, or 14.0 mole %; from 1.8 mole % to: 1.9 mole %, 2.0 mole %, 2.1 mole %, 2.2 mole %, 2.3 mole %, 2.4 mole %, 2.5 mole %, 2.6 mole %, 2.7 mole %, 2.8 mole %, 2.9 mole %, 3.0 mole %, 3.1 mole %, 3.2 mole %, 3.3 mole %, 3.4 mole %, 3.5 mole %, 3.6 mole %, 3.7 mole %, 3.8 mole %, 3.9 mole %, 4.0 mole %, 4.1 mole %, 4.2 mole %, 4.3 mole %, 4.4 mole %, 4.5 mole %, 4.6 mole %, 4.7 mole %, 4.8 mole %, 4.9 mole %, 5.0 mole %, 5.1 mole %, 5.2 mole %, 5.3 mole %, 5.4 mole %, 5.5 mole %, 5.6 mole %, 5.7 mole %, 5.8 mole %, 5.9 mole %, 6.0 mole %, 6.1 mole %, 6.2 mole %, 6.3 mole %, 6.4 mole %, 6.5 mole %, 6.6 mole %, 6.7 mole %, 6.8 mole %, 6.9 mole %, 7.0 mole %, 7.1 mole %, 7.2 mole %, 7.3 mole %, 7.4 mole %, 7.5 mole %, 7.6 mole %, 7.7 mole %, 7.8 mole %, 7.9 mole %, or 8.0 mole %; from 1.9 mole % to: 2.0 mole %, 2.1 mole %, 2.2 mole %, 2.3 mole %, 2.4 mole %, 2.5 mole %, 2.6 mole %, 2.7 mole %, 2.8 mole %, 2.9 mole %, 3.0 mole %, 3.1 mole %, 3.2 mole %, 3.3 mole %, 3.4 mole %, 3.5 mole %, 3.6 mole %, 3.7 mole %, 3.8 mole %, 3.9 mole %, 4.0 mole %, 4.1 mole %, 4.2 mole %, 4.3 mole %, 4.4 mole %, 4.5 mole %, 4.6 mole %, 4.7 mole %, 4.8 mole %, 4.9 mole %, 5.0 mole %, 5.1 mole %, 5.2 mole %, 5.3 mole %, 5.4 mole %, 5.5 mole %, 5.6 mole %, 5.7 mole %, 5.8 mole %, 5.9 mole %, 6.0 mole %, 6.1 mole %, 6.2 mole %, 6.3 mole %, 6.4 mole %, 6.5 mole %, 6.6 mole %, 6.7 mole %, 6.8 mole %, 6.9 mole %, 7.0 mole %, 7.1 mole %, 7.2 mole %, 7.3 mole %, 7.4 mole %, 7.5 mole %, 7.6 mole %, 7.7 mole %, 7.8 mole %, 7.9 mole %, 8.0 mole %, 8.1 mole %, 8.2 mole %, 8.3 mole %, 8.4 mole %, 8.5 mole %, 8.6 mole %, 8.7 mole %, 8.8 mole %, 8.9 mole %, 9.0 mole %, 9.1 mole %, 9.2 mole %, 9.3 mole %, 9.4 mole %, 9.5 mole %, 9.6 mole %, 9.7 mole %, 9.8 mole %, 9.9 mole %, 10.0 mole %, 10.1 mole %, 10.2 mole %, 10.3 mole %, 10.4 mole %, 10.5 mole %, 10.6 mole %, 10.7 mole %, 10.8 mole %, 10.9 mole %, 11.0 mole %, 11.1 mole %, 11.2 mole %, 11.3 mole %, 11.4 mole %, 11.5 mole %, 11.6 mole %, 11.7 mole %, 11.8 mole %, 11.9 mole %, 12.0 mole %, 12.1 mole %, 12.2 mole %, 12.3 mole %, 12.4 mole %, 12.5 mole %, 12.6 mole %, 12.7 mole %, 12.8 mole %, 12.9 mole %, 12.0 mole %, 13.1 mole %, 13.2 mole %, 13.3 mole %, 13.4 mole %, 13.5 mole %, 13.6 mole %, 13.7 mole %, 13.8 mole %, 13.9 mole %, or 14.0 mole %; from 2.0 mole % to: 2.1 mole %, 2.2 mole %, 2.3 mole %, 2.4 mole %, 2.5 mole %, 2.6 mole %, 2.7 mole %, 2.8 mole %, 2.9 mole %, 3.0 mole %, 3.1 mole %, 3.2 mole %, 3.3 mole %, 3.4 mole %, 3.5 mole %, 3.6 mole %, 3.7 mole %, 3.8 mole %, 3.9 mole %, 4.0 mole %, 4.1 mole %, 4.2 mole %, 4.3 mole %, 4.4 mole %, 4.5 mole %, 4.6 mole %, 4.7 mole %, 4.8 mole %, 4.9 mole %, 5.0 mole %, 5.1 mole %, 5.2 mole %, 5.3 mole %, 5.4 mole %, 5.5 mole %, 5.6 mole %, 5.7 mole %, 5.8 mole %, 5.9 mole %, 6.0 mole %, 6.1 mole %, 6.2 mole %, 6.3 mole %, 6.4 mole %, 6.5 mole %, 6.6 mole %, 6.7 mole %, 6.8 mole %, 6.9 mole %, 7.0 mole %, 7.1 mole %, 7.2 mole %, 7.3 mole %, 7.4 mole %, 7.5 mole %, 7.6 mole %, 7.7 mole %, 7.8 mole %, 7.9 mole %, 8.0 mole %, 8.1 mole %, 8.2 mole %, 8.3 mole %, 8.4 mole %, 8.5 mole %, 8.6 mole %, 8.7 mole %, 8.8 mole %, 8.9 mole %, 9.0 mole %, 9.1 mole %, 9.2 mole %, 9.3 mole %, 9.4 mole %, 9.5 mole %, 9.6 mole %, 9.7 mole %, 9.8 mole %, 9.9 mole %, 10.0 mole %, 10.1 mole %, 10.2 mole %, 10.3 mole %, 10.4 mole %, 10.5 mole %, 10.6 mole %, 10.7 mole %, 10.8 mole %, 10.9 mole %, 11.0 mole %, 11.1 mole %, 11.2 mole %, 11.3 mole %, 11.4 mole %, 11.5 mole %, 11.6 mole %, 11.7 mole %, 11.8 mole %, 11.9 mole %, 12.0 mole %, 12.1 mole %, 12.2 mole %, 12.3 mole %, 12.4 mole %, 12.5 mole %, 12.6 mole %, 12.7 mole %, 12.8 mole %, 12.9 mole %, 12.0 mole %, 13.1 mole %, 13.2 mole %, 13.3 mole %, 13.4 mole %, 13.5 mole %, 13.6 mole %, 13.7 mole %, 13.8 mole %, 13.9 mole %, or 14.0 mole %; from 2.1 mole % to: 2.2 mole %, 2.3 mole %, 2.4 mole %, 2.5 mole %, 2.6 mole %, 2.7 mole %, 2.8 mole %, 2.9 mole %, 3.0 mole %, 3.1 mole %, 3.2 mole %, 3.3 mole %, 3.4 mole %, 3.5 mole %, 3.6 mole %, 3.7 mole %, 3.8 mole %, 3.9 mole %, 4.0 mole %, 4.1 mole %, 4.2 mole %, 4.3 mole %, 4.4 mole %, 4.5 mole %, 4.6 mole %, 4.7 mole %, 4.8 mole %, 4.9 mole %, 5.0 mole %, 5.1 mole %, 5.2 mole %, 5.3 mole %, 5.4 mole %, 5.5 mole %, 5.6 mole %, 5.7 mole %, 5.8 mole %, 5.9 mole %, 6.0 mole %, 6.1 mole %, 6.2 mole %, 6.3 mole %, 6.4 mole %, 6.5 mole %, 6.6 mole %, 6.7 mole %, 6.8 mole %, 6.9 mole %, 7.0 mole %, 7.1 mole %, 7.2 mole %, 7.3 mole %, 7.4 mole %, 7.5 mole %, 7.6 mole %, 7.7 mole %, 7.8 mole %, 7.9 mole %, 8.0 mole %, 8.1 mole %, 8.2 mole %, 8.3 mole %, 8.4 mole %, 8.5 mole %, 8.6 mole %, 8.7 mole %, 8.8 mole %, 8.9 mole %, 9.0 mole %, 9.1 mole %, 9.2 mole %, 9.3 mole %, 9.4 mole %, 9.5 mole %, 9.6 mole %, 9.7 mole %, 9.8 mole %, 9.9 mole %, 10.0 mole %, 10.1 mole %, 10.2 mole %, 10.3 mole %, 10.4 mole %, 10.5 mole %, 10.6 mole %, 10.7 mole %, 10.8 mole %, 10.9 mole %, 11.0 mole %, 11.1 mole %, 11.2 mole %, 11.3 mole %, 11.4 mole %, 11.5 mole %, 11.6 mole %, 11.7 mole %, 11.8 mole %, 11.9 mole %, 12.0 mole %, 12.1 mole %, 12.2 mole %, 12.3 mole %, 12.4 mole %, 12.5 mole %, 12.6 mole %, 12.7 mole %, 12.8 mole %, 12.9 mole %, 12.0 mole %, 13.1 mole %, 13.2 mole %, 13.3 mole %, 13.4 mole %, 13.5 mole %, 13.6 mole %, 13.7 mole %, 13.8 mole %, 13.9 mole %, or 14.0 mole %; from 2.2 mole % to: 2.3 mole %, 2.4 mole %, 2.5 mole %, 2.6 mole %, 2.7 mole %, 2.8 mole %, 2.9 mole %, 3.0 mole %, 3.1 mole %, 3.2 mole %, 3.3 mole %, 3.4 mole %, 3.5 mole %, 3.6 mole %, 3.7 mole %, 3.8 mole %, 3.9 mole %, 4.0 mole %, 4.1 mole %, 4.2 mole %, 4.3 mole %, 4.4 mole %, 4.5 mole %, 4.6 mole %, 4.7 mole %, 4.8 mole %, 4.9 mole %, 5.0 mole %, 5.1 mole %, 5.2 mole %, 5.3 mole %, 5.4 mole %, 5.5 mole %, 5.6 mole %, 5.7 mole %, 5.8 mole %, 5.9 mole %, 6.0 mole %, 6.1 mole %, 6.2 mole %, 6.3 mole %, 6.4 mole %, 6.5 mole %, 6.6 mole %, 6.7 mole %, 6.8 mole %, 6.9 mole %, 7.0 mole %, 7.1 mole %, 7.2 mole %, 7.3 mole %, 7.4 mole %, 7.5 mole %, 7.6 mole %, 7.7 mole %, 7.8 mole %, 7.9 mole %, 8.0 mole %, 8.1 mole %, 8.2 mole %, 8.3 mole %, 8.4 mole %, 8.5 mole %, 8.6 mole %, 8.7 mole %, 8.8 mole %, 8.9 mole %, 9.0 mole %, 9.1 mole %, 9.2 mole %, 9.3 mole %, 9.4 mole %, 9.5 mole %, 9.6 mole %, 9.7 mole %, 9.8 mole %, 9.9 mole %, 10.0 mole %, 10.1 mole %, 10.2 mole %, 10.3 mole %, 10.4 mole %, 10.5 mole %, 10.6 mole %, 10.7 mole %, 10.8 mole %, 10.9 mole %, 11.0 mole %, 11.1 mole %, 11.2 mole %, 11.3 mole %, 11.4 mole %, 11.5 mole %, 11.6 mole %, 11.7 mole %, 11.8 mole %, 11.9 mole %, 12.0 mole %, 12.1 mole %, 12.2 mole %, 12.3 mole %, 12.4 mole %, 12.5 mole %, 12.6 mole %, 12.7 mole %, 12.8 mole %, 12.9 mole %, 12.0 mole %, 13.1 mole %, 13.2 mole %, 13.3 mole %, 13.4 mole %, 13.5 mole %, 13.6 mole %, 13.7 mole %, 13.8 mole %, 13.9 mole %, or 14.0 mole %; from 2.3 mole % to: 2.4 mole %, 2.5 mole %, 2.6 mole %, 2.7 mole %, 2.8 mole %, 2.9 mole %, 3.0 mole %, 3.1 mole %, 3.2 mole %, 3.3 mole %, 3.4 mole %, 3.5 mole %, 3.6 mole %, 3.7 mole %, 3.8 mole %, 3.9 mole %, 4.0 mole %, 4.1 mole %, 4.2 mole %, 4.3 mole %, 4.4 mole %, 4.5 mole %, 4.6 mole %, 4.7 mole %, 4.8 mole %, 4.9 mole %, 5.0 mole %, 5.1 mole %, 5.2 mole %, 5.3 mole %, 5.4 mole %, 5.5 mole %, 5.6 mole %, 5.7 mole %, 5.8 mole %, 5.9 mole %, 6.0 mole %, 6.1 mole %, 6.2 mole %, 6.3 mole %, 6.4 mole %, 6.5 mole %, 6.6 mole %, 6.7 mole %, 6.8 mole %, 6.9 mole %, 7.0 mole %, 7.1 mole %, 7.2 mole %, 7.3 mole %, 7.4 mole %, 7.5 mole %, 7.6 mole %, 7.7 mole %, 7.8 mole %, 7.9 mole %, or 8.0 mole %; from 2.4 mole % to: 2.5 mole %, 2.6 mole %, 2.7 mole %, 2.8 mole %, 2.9 mole %, 3.0 mole %, 3.1 mole %, 3.2 mole %, 3.3 mole %, 3.4 mole %, 3.5 mole %, 3.6 mole %, 3.7 mole %, 3.8 mole %, 3.9 mole %, 4.0 mole %, 4.1 mole %, 4.2 mole %, 4.3 mole %, 4.4 mole %, 4.5 mole %, 4.6 mole %, 4.7 mole %, 4.8 mole %, 4.9 mole %, 5.0 mole %, 5.1 mole %, 5.2 mole %, 5.3 mole %, 5.4 mole %, 5.5 mole %, 5.6 mole %, 5.7 mole %, 5.8 mole %, 5.9 mole %, 6.0 mole %, 6.1 mole %, 6.2 mole %, 6.3 mole %, 6.4 mole %, 6.5 mole %, 6.6 mole %, 6.7 mole %, 6.8 mole %, 6.9 mole %, 7.0 mole %, 7.1 mole %, 7.2 mole %, 7.3 mole %, 7.4 mole %, 7.5 mole %, 7.6 mole %, 7.7 mole %, 7.8 mole %, 7.9 mole %, 8.0 mole %, 8.1 mole %, 8.2 mole %, 8.3 mole %, 8.4 mole %, 8.5 mole %, 8.6 mole %, 8.7 mole %, 8.8 mole %, 8.9 mole %, 9.0 mole %, 9.1 mole %, 9.2 mole %, 9.3 mole %, 9.4 mole %, 9.5 mole %, 9.6 mole %, 9.7 mole %, 9.8 mole %, 9.9 mole %, 10.0 mole %, 10.1 mole %, 10.2 mole %, 10.3 mole %, 10.4 mole %, 10.5 mole %, 10.6 mole %, 10.7 mole %, 10.8 mole %, 10.9 mole %, 11.0 mole %, 11.1 mole %, 11.2 mole %, 11.3 mole %, 11.4 mole %, 11.5 mole %, 11.6 mole %, 11.7 mole %, 11.8 mole %, 11.9 mole %, 12.0 mole %, 12.1 mole %, 12.2 mole %, 12.3 mole %, 12.4 mole %, 12.5 mole %, 12.6 mole %, 12.7 mole %, 12.8 mole %, 12.9 mole %, 12.0 mole %, 13.1 mole %, 13.2 mole %, 13.3 mole %, 13.4 mole %, 13.5 mole %, 13.6 mole %, 13.7 mole %, 13.8 mole %, 13.9 mole %, or 14.0 mole %; from 2.5 mole % to: 2.6 mole %, 2.7 mole %, 2.8 mole %, 2.9 mole %, 3.0 mole %, 3.1 mole %, 3.2 mole %, 3.3 mole %, 3.4 mole %, 3.5 mole %, 3.6 mole %, 3.7 mole %, 3.8 mole %, 3.9 mole %, 4.0 mole %, 4.1 mole %, 4.2 mole %, 4.3 mole %, 4.4 mole %, 4.5 mole %, 4.6 mole %, 4.7 mole %, 4.8 mole %, 4.9 mole %, 5.0 mole %, 5.1 mole %, 5.2 mole %, 5.3 mole %, 5.4 mole %, 5.5 mole %, 5.6 mole %, 5.7 mole %, 5.8 mole %, 5.9 mole %, 6.0 mole %, 6.1 mole %, 6.2 mole %, 6.3 mole %, 6.4 mole %, 6.5 mole %, 6.6 mole %, 6.7 mole %, 6.8 mole %, 6.9 mole %, 7.0 mole %, 7.1 mole %, 7.2 mole %, 7.3 mole %, 7.4 mole %, 7.5 mole %, 7.6 mole %, 7.7 mole %, 7.8 mole %, 7.9 mole %, 8.0 mole %, 8.1 mole %, 8.2 mole %, 8.3 mole %, 8.4 mole %, 8.5 mole %, 8.6 mole %, 8.7 mole %, 8.8 mole %, 8.9 mole %, 9.0 mole %, 9.1 mole %, 9.2 mole %, 9.3 mole %, 9.4 mole %, 9.5 mole %, 9.6 mole %, 9.7 mole %, 9.8 mole %, 9.9 mole %, 10.0 mole %, 10.1 mole %, 10.2 mole %, 10.3 mole %, 10.4 mole %, 10.5 mole %, 10.6 mole %, 10.7 mole %, 10.8 mole %, 10.9 mole %, 11.0 mole %, 11.1 mole %, 11.2 mole %, 11.3 mole %, 11.4 mole %, 11.5 mole %, 11.6 mole %, 11.7 mole %, 11.8 mole %, 11.9 mole %, 12.0 mole %, 12.1 mole %, 12.2 mole %, 12.3 mole %, 12.4 mole %, 12.5 mole %, 12.6 mole %, 12.7 mole %, 12.8 mole %, 12.9 mole %, 12.0 mole %, 13.1 mole %, 13.2 mole %, 13.3 mole %, 13.4 mole %, 13.5 mole %, 13.6 mole %, 13.7 mole %, 13.8 mole %, 13.9 mole %, or 14.0 mole %; from 2.6 mole % to: 2.7 mole %, 2.8 mole %, 2.9 mole %, 3.0 mole %, 3.1 mole %, 3.2 mole %, 3.3 mole %, 3.4 mole %, 3.5 mole %, 3.6 mole %, 3.7 mole %, 3.8 mole %, 3.9 mole %, 4.0 mole %, 4.1 mole %, 4.2 mole %, 4.3 mole %, 4.4 mole %, 4.5 mole %, 4.6 mole %, 4.7 mole %, 4.8 mole %, 4.9 mole %, 5.0 mole %, 5.1 mole %, 5.2 mole %, 5.3 mole %, 5.4 mole %, 5.5 mole %, 5.6 mole %, 5.7 mole %, 5.8 mole %, 5.9 mole %, 6.0 mole %, 6.1 mole %, 6.2 mole %, 6.3 mole %, 6.4 mole %, 6.5 mole %, 6.6 mole %, 6.7 mole %, 6.8 mole %, 6.9 mole %, 7.0 mole %, 7.1 mole %, 7.2 mole %, 7.3 mole %, 7.4 mole %, 7.5 mole %, 7.6 mole %, 7.7 mole %, 7.8 mole %, 7.9 mole %, 8.0 mole %, 8.1 mole %, 8.2 mole %, 8.3 mole %, 8.4 mole %, 8.5 mole %, 8.6 mole %, 8.7 mole %, 8.8 mole %, 8.9 mole %, 9.0 mole %, 9.1 mole %, 9.2 mole %, 9.3 mole %, 9.4 mole %, 9.5 mole %, 9.6 mole %, 9.7 mole %, 9.8 mole %, 9.9 mole %, 10.0 mole %, 10.1 mole %, 10.2 mole %, 10.3 mole %, 10.4 mole %, 10.5 mole %, 10.6 mole %, 10.7 mole %, 10.8 mole %, 10.9 mole %, 11.0 mole %, 11.1 mole %, 11.2 mole %, 11.3 mole %, 11.4 mole %, 11.5 mole %, 11.6 mole %, 11.7 mole %, 11.8 mole %, 11.9 mole %, 12.0 mole %, 12.1 mole %, 12.2 mole %, 12.3 mole %, 12.4 mole %, 12.5 mole %, 12.6 mole %, 12.7 mole %, 12.8 mole %, 12.9 mole %, 12.0 mole %, 13.1 mole %, 13.2 mole %, 13.3 mole %, 13.4 mole %, 13.5 mole %, 13.6 mole %, 13.7 mole %, 13.8 mole %, 13.9 mole %, or 14.0 mole %; from 2.7 mole % to: 2.8 mole %, 2.9 mole %, 3.0 mole %, 3.1 mole %, 3.2 mole %, 3.3 mole %, 3.4 mole %, 3.5 mole %, 3.6 mole %, 3.7 mole %, 3.8 mole %, 3.9 mole %, 4.0 mole %, 4.1 mole %, 4.2 mole %, 4.3 mole %, 4.4 mole %, 4.5 mole %, 4.6 mole %, 4.7 mole %, 4.8 mole %, 4.9 mole %, 5.0 mole %, 5.1 mole %, 5.2 mole %, 5.3 mole %, 5.4 mole %, 5.5 mole %, 5.6 mole %, 5.7 mole %, 5.8 mole %, 5.9 mole %, 6.0 mole %, 6.1 mole %, 6.2 mole %, 6.3 mole %, 6.4 mole %, 6.5 mole %, 6.6 mole %, 6.7 mole %, 6.8 mole %, 6.9 mole %, 7.0 mole %, 7.1 mole %, 7.2 mole %, 7.3 mole %, 7.4 mole %, 7.5 mole %, 7.6 mole %, 7.7 mole %, 7.8 mole %, 7.9 mole %, 8.0 mole %, 8.1 mole %, 8.2 mole %, 8.3 mole %, 8.4 mole %, 8.5 mole %, 8.6 mole %, 8.7 mole %, 8.8 mole %, 8.9 mole %, 9.0 mole %, 9.1 mole %, 9.2 mole %, 9.3 mole %, 9.4 mole %, 9.5 mole %, 9.6 mole %, 9.7 mole %, 9.8 mole %, 9.9 mole %, 10.0 mole %, 10.1 mole %, 10.2 mole %, 10.3 mole %, 10.4 mole %, 10.5 mole %, 10.6 mole %, 10.7 mole %, 10.8 mole %, 10.9 mole %, 11.0 mole %, 11.1 mole %, 11.2 mole %, 11.3 mole %, 11.4 mole %, 11.5 mole %, 11.6 mole %, 11.7 mole %, 11.8 mole %, 11.9 mole %, 12.0 mole %, 12.1 mole %, 12.2 mole %, 12.3 mole %, 12.4 mole %, 12.5 mole %, 12.6 mole %, 12.7 mole %, 12.8 mole %, 12.9 mole %, 12.0 mole %, 13.1 mole %, 13.2 mole %, 13.3 mole %, 13.4 mole %, 13.5 mole %, 13.6 mole %, 13.7 mole %, 13.8 mole %, 13.9 mole %, or 14.0 mole %; from 2.8 mole % to: 2.9 mole %, 3.0 mole %, 3.1 mole %, 3.2 mole %, 3.3 mole %, 3.4 mole %, 3.5 mole %, 3.6 mole %, 3.7 mole %, 3.8 mole %, 3.9 mole %, 4.0 mole %, 4.1 mole %, 4.2 mole %, 4.3 mole %, 4.4 mole %, 4.5 mole %, 4.6 mole %, 4.7 mole %, 4.8 mole %, 4.9 mole %, 5.0 mole %, 5.1 mole %, 5.2 mole %, 5.3 mole %, 5.4 mole %, 5.5 mole %, 5.6 mole %, 5.7 mole %, 5.8 mole %, 5.9 mole %, 6.0 mole %, 6.1 mole %, 6.2 mole %, 6.3 mole %, 6.4 mole %, 6.5 mole %, 6.6 mole %, 6.7 mole %, 6.8 mole %, 6.9 mole %, 7.0 mole %, 7.1 mole %, 7.2 mole %, 7.3 mole %, 7.4 mole %, 7.5 mole %, 7.6 mole %, 7.7 mole %, 7.8 mole %, 7.9 mole %, 8.0 mole %, 8.1 mole %, 8.2 mole %, 8.3 mole %, 8.4 mole %, 8.5 mole %, 8.6 mole %, 8.7 mole %, 8.8 mole %, 8.9 mole %, 9.0 mole %, 9.1 mole %, 9.2 mole %, 9.3 mole %, 9.4 mole %, 9.5 mole %, 9.6 mole %, 9.7 mole %, 9.8 mole %, 9.9 mole %, 10.0 mole %, 10.1 mole %, 10.2 mole %, 10.3 mole %, 10.4 mole %, 10.5 mole %, 10.6 mole %, 10.7 mole %, 10.8 mole %, 10.9 mole %, 11.0 mole %, 11.1 mole %, 11.2 mole %, 11.3 mole %, 11.4 mole %, 11.5 mole %, 11.6 mole %, 11.7 mole %, 11.8 mole %, 11.9 mole %, 12.0 mole %, 12.1 mole %, 12.2 mole %, 12.3 mole %, 12.4 mole %, 12.5 mole %, 12.6 mole %, 12.7 mole %, 12.8 mole %, 12.9 mole %, 12.0 mole %, 13.1 mole %, 13.2 mole %, 13.3 mole %, 13.4 mole %, 13.5 mole %, 13.6 mole %, 13.7 mole %, 13.8 mole %, 13.9 mole %, or 14.0 mole %; from 2.9 mole % to: 3.0 mole %, 3.1 mole %, 3.2 mole %, 3.3 mole %, 3.4 mole %, 3.5 mole %, 3.6 mole %, 3.7 mole %, 3.8 mole %, 3.9 mole %, 4.0 mole %, 4.1 mole %, 4.2 mole %, 4.3 mole %, 4.4 mole %, 4.5 mole %, 4.6 mole %, 4.7 mole %, 4.8 mole %, 4.9 mole %, 5.0 mole %, 5.1 mole %, 5.2 mole %, 5.3 mole %, 5.4 mole %, 5.5 mole %, 5.6 mole %, 5.7 mole %, 5.8 mole %, 5.9 mole %, 6.0 mole %, 6.1 mole %, 6.2 mole %, 6.3 mole %, 6.4 mole %, 6.5 mole %, 6.6 mole %, 6.7 mole %, 6.8 mole %, 6.9 mole %, 7.0 mole %, 7.1 mole %, 7.2 mole %, 7.3 mole %, 7.4 mole %, 7.5 mole %, 7.6 mole %, 7.7 mole %, 7.8 mole %, 7.9 mole %, 8.0 mole %, 8.1 mole %, 8.2 mole %, 8.3 mole %, 8.4 mole %, 8.5 mole %, 8.6 mole %, 8.7 mole %, 8.8 mole %, 8.9 mole %, 9.0 mole %, 9.1 mole %, 9.2 mole %, 9.3 mole %, 9.4 mole %, 9.5 mole %, 9.6 mole %, 9.7 mole %, 9.8 mole %, 9.9 mole %, 10.0 mole %, 10.1 mole %, 10.2 mole %, 10.3 mole %, 10.4 mole %, 10.5 mole %, 10.6 mole %, 10.7 mole %, 10.8 mole %, 10.9 mole %, 11.0 mole %, 11.1 mole %, 11.2 mole %, 11.3 mole %, 11.4 mole %, 11.5 mole %, 11.6 mole %, 11.7 mole %, 11.8 mole %, 11.9 mole %, 12.0 mole %, 12.1 mole %, 12.2 mole %, 12.3 mole %, 12.4 mole %, 12.5 mole %, 12.6 mole %, 12.7 mole %, 12.8 mole %, 12.9 mole %, 12.0 mole %, 13.1 mole %, 13.2 mole %, 13.3 mole %, 13.4 mole %, 13.5 mole %, 13.6 mole %, 13.7 mole %, 13.8 mole %, 13.9 mole %, or 14.0 mole %; from 3.0 mole % to: 3.1 mole %, 3.2 mole %, 3.3 mole %, 3.4 mole %, 3.5 mole %, 3.6 mole %, 3.7 mole %, 3.8 mole %, 3.9 mole %, 4.0 mole %, 4.1 mole %, 4.2 mole %, 4.3 mole %, 4.4 mole %, 4.5 mole %, 4.6 mole %, 4.7 mole %, 4.8 mole %, 4.9 mole %, 5.0 mole %, 5.1 mole %, 5.2 mole %, 5.3 mole %, 5.4 mole %, 5.5 mole %, 5.6 mole %, 5.7 mole %, 5.8 mole %, 5.9 mole %, 6.0 mole %, 6.1 mole %, 6.2 mole %, 6.3 mole %, 6.4 mole %, 6.5 mole %, 6.6 mole %, 6.7 mole %, 6.8 mole %, 6.9 mole %, 7.0 mole %, 7.1 mole %, 7.2 mole %, 7.3 mole %, 7.4 mole %, 7.5 mole %, 7.6 mole %, 7.7 mole %, 7.8 mole %, 7.9 mole %, 8.0 mole %, 8.1 mole %, 8.2 mole %, 8.3 mole %, 8.4 mole %, 8.5 mole %, 8.6 mole %, 8.7 mole %, 8.8 mole %, 8.9 mole %, 9.0 mole %, 9.1 mole %, 9.2 mole %, 9.3 mole %, 9.4 mole %, 9.5 mole %, 9.6 mole %, 9.7 mole %, 9.8 mole %, 9.9 mole %, 10.0 mole %, 10.1 mole %, 10.2 mole %, 10.3 mole %, 10.4 mole %, 10.5 mole %, 10.6 mole %, 10.7 mole %, 10.8 mole %, 10.9 mole %, 11.0 mole %, 11.1 mole %, 11.2 mole %, 11.3 mole %, 11.4 mole %, 11.5 mole %, 11.6 mole %, 11.7 mole %, 11.8 mole %, 11.9 mole %, 12.0 mole %, 12.1 mole %, 12.2 mole %, 12.3 mole %, 12.4 mole %, 12.5 mole %, 12.6 mole %, 12.7 mole %, 12.8 mole %, 12.9 mole %, 12.0 mole %, 13.1 mole %, 13.2 mole %, 13.3 mole %, 13.4 mole %, 13.5 mole %, 13.6 mole %, 13.7 mole %, 13.8 mole %, 13.9 mole %, or 14.0 mole %; from 3.1 mole % to: 3.2 mole %, 3.3 mole %, 3.4 mole %, 3.5 mole %, 3.6 mole %, 3.7 mole %, 3.8 mole %, 3.9 mole %, 4.0 mole %, 4.1 mole %, 4.2 mole %, 4.3 mole %, 4.4 mole %, 4.5 mole %, 4.6 mole %, 4.7 mole %, 4.8 mole %, 4.9 mole %, 5.0 mole %, 5.1 mole %, 5.2 mole %, 5.3 mole %, 5.4 mole %, 5.5 mole %, 5.6 mole %, 5.7 mole %, 5.8 mole %, 5.9 mole %, 6.0 mole %, 6.1 mole %, 6.2 mole %, 6.3 mole %, 6.4 mole %, 6.5 mole %, 6.6 mole %, 6.7 mole %, 6.8 mole %, 6.9 mole %, 7.0 mole %, 7.1 mole %, 7.2 mole %, 7.3 mole %, 7.4 mole %, 7.5 mole %, 7.6 mole %, 7.7 mole %, 7.8 mole %, 7.9 mole %, 8.0 mole %, 8.1 mole %, 8.2 mole %, 8.3 mole %, 8.4 mole %, 8.5 mole %, 8.6 mole %, 8.7 mole %, 8.8 mole %, 8.9 mole %, 9.0 mole %, 9.1 mole %, 9.2 mole %, 9.3 mole %, 9.4 mole %, 9.5 mole %, 9.6 mole %, 9.7 mole %, 9.8 mole %, 9.9 mole %, 10.0 mole %, 10.1 mole %, 10.2 mole %, 10.3 mole %, 10.4 mole %, 10.5 mole %, 10.6 mole %, 10.7 mole %, 10.8 mole %, 10.9 mole %, 11.0 mole %, 11.1 mole %, 11.2 mole %, 11.3 mole %, 11.4 mole %, 11.5 mole %, 11.6 mole %, 11.7 mole %, 11.8 mole %, 11.9 mole %, 12.0 mole %, 12.1 mole %, 12.2 mole %, 12.3 mole %, 12.4 mole %, 12.5 mole %, 12.6 mole %, 12.7 mole %, 12.8 mole %, 12.9 mole %, 12.0 mole %, 13.1 mole %, 13.2 mole %, 13.3 mole %, 13.4 mole %, 13.5 mole %, 13.6 mole %, 13.7 mole %, 13.8 mole %, 13.9 mole %, or 14.0 mole %; from 3.2 mole % to: 3.3 mole %, 3.4 mole %, 3.5 mole %, 3.6 mole %, 3.7 mole %, 3.8 mole %, 3.9 mole %, 4.0 mole %, 4.1 mole %, 4.2 mole %, 4.3 mole %, 4.4 mole %, 4.5 mole %, 4.6 mole %, 4.7 mole %, 4.8 mole %, 4.9 mole %, 5.0 mole %, 5.1 mole %, 5.2 mole %, 5.3 mole %, 5.4 mole %, 5.5 mole %, 5.6 mole %, 5.7 mole %, 5.8 mole %, 5.9 mole %, 6.0 mole %, 6.1 mole %, 6.2 mole %, 6.3 mole %, 6.4 mole %, 6.5 mole %, 6.6 mole %, 6.7 mole %, 6.8 mole %, 6.9 mole %, 7.0 mole %, 7.1 mole %, 7.2 mole %, 7.3 mole %, 7.4 mole %, 7.5 mole %, 7.6 mole %, 7.7 mole %, 7.8 mole %, 7.9 mole %, 8.0 mole %, 8.1 mole %, 8.2 mole %, 8.3 mole %, 8.4 mole %, 8.5 mole %, 8.6 mole %, 8.7 mole %, 8.8 mole %, 8.9 mole %, 9.0 mole %, 9.1 mole %, 9.2 mole %, 9.3 mole %, 9.4 mole %, 9.5 mole %, 9.6 mole %, 9.7 mole %, 9.8 mole %, 9.9 mole %, 10.0 mole %, 10.1 mole %, 10.2 mole %, 10.3 mole %, 10.4 mole %, 10.5 mole %, 10.6 mole %, 10.7 mole %, 10.8 mole %, 10.9 mole %, 11.0 mole %, 11.1 mole %, 11.2 mole %, 11.3 mole %, 11.4 mole %, 11.5 mole %, 11.6 mole %, 11.7 mole %, 11.8 mole %, 11.9 mole %, 12.0 mole %, 12.1 mole %, 12.2 mole %, 12.3 mole %, 12.4 mole %, 12.5 mole %, 12.6 mole %, 12.7 mole %, 12.8 mole %, 12.9 mole %, 12.0 mole %, 13.1 mole %, 13.2 mole %, 13.3 mole %, 13.4 mole %, 13.5 mole %, 13.6 mole %, 13.7 mole %, 13.8 mole %, 13.9 mole %, or 14.0 mole %; from 3.3 mole % to: 3.4 mole %, 3.5 mole %, 3.6 mole %, 3.7 mole %, 3.8 mole %, 3.9 mole %, 4.0 mole %, 4.1 mole %, 4.2 mole %, 4.3 mole %, 4.4 mole %, 4.5 mole %, 4.6 mole %, 4.7 mole %, 4.8 mole %, 4.9 mole %, 5.0 mole %, 5.1 mole %, 5.2 mole %, 5.3 mole %, 5.4 mole %, 5.5 mole %, 5.6 mole %, 5.7 mole %, 5.8 mole %, 5.9 mole %, 6.0 mole %, 6.1 mole %, 6.2 mole %, 6.3 mole %, 6.4 mole %, 6.5 mole %, 6.6 mole %, 6.7 mole %, 6.8 mole %, 6.9 mole %, 7.0 mole %, 7.1 mole %, 7.2 mole %, 7.3 mole %, 7.4 mole %, 7.5 mole %, 7.6 mole %, 7.7 mole %, 7.8 mole %, 7.9 mole %, 8.0 mole %, 8.1 mole %, 8.2 mole %, 8.3 mole %, 8.4 mole %, 8.5 mole %, 8.6 mole %, 8.7 mole %, 8.8 mole %, 8.9 mole %, 9.0 mole %, 9.1 mole %, 9.2 mole %, 9.3 mole %, 9.4 mole %, 9.5 mole %, 9.6 mole %, 9.7 mole %, 9.8 mole %, 9.9 mole %, 10.0 mole %, 10.1 mole %, 10.2 mole %, 10.3 mole %, 10.4 mole %, 10.5 mole %, 10.6 mole %, 10.7 mole %, 10.8 mole %, 10.9 mole %, 11.0 mole %, 11.1 mole %, 11.2 mole %, 11.3 mole %, 11.4 mole %, 11.5 mole %, 11.6 mole %, 11.7 mole %, 11.8 mole %, 11.9 mole %, 12.0 mole %, 12.1 mole %, 12.2 mole %, 12.3 mole %, 12.4 mole %, 12.5 mole %, 12.6 mole %, 12.7 mole %, 12.8 mole %, 12.9 mole %, 12.0 mole %, 13.1 mole %, 13.2 mole %, 13.3 mole %, 13.4 mole %, 13.5 mole %, 13.6 mole %, 13.7 mole %, 13.8 mole %, 13.9 mole %, or 14.0 mole %; from 3.4 mole % to: 3.5 mole %, 3.6 mole %, 3.7 mole %, 3.8 mole %, 3.9 mole %, 4.0 mole %, 4.1 mole %, 4.2 mole %, 4.3 mole %, 4.4 mole %, 4.5 mole %, 4.6 mole %, 4.7 mole %, 4.8 mole %, 4.9 mole %, 5.0 mole %, 5.1 mole %, 5.2 mole %, 5.3 mole %, 5.4 mole %, 5.5 mole %, 5.6 mole %, 5.7 mole %, 5.8 mole %, 5.9 mole %, 6.0 mole %, 6.1 mole %, 6.2 mole %, 6.3 mole %, 6.4 mole %, 6.5 mole %, 6.6 mole %, 6.7 mole %, 6.8 mole %, 6.9 mole %, 7.0 mole %, 7.1 mole %, 7.2 mole %, 7.3 mole %, 7.4 mole %, 7.5 mole %, 7.6 mole %, 7.7 mole %, 7.8 mole %, 7.9 mole %, 8.0 mole %, 8.1 mole %, 8.2 mole %, 8.3 mole %, 8.4 mole %, 8.5 mole %, 8.6 mole %, 8.7 mole %, 8.8 mole %, 8.9 mole %, 9.0 mole %, 9.1 mole %, 9.2 mole %, 9.3 mole %, 9.4 mole %, 9.5 mole %, 9.6 mole %, 9.7 mole %, 9.8 mole %, 9.9 mole %, 10.0 mole %, 10.1 mole %, 10.2 mole %, 10.3 mole %, 10.4 mole %, 10.5 mole %, 10.6 mole %, 10.7 mole %, 10.8 mole %, 10.9 mole %, 11.0 mole %, 11.1 mole %, 11.2 mole %, 11.3 mole %, 11.4 mole %, 11.5 mole %, 11.6 mole %, 11.7 mole %, 11.8 mole %, 11.9 mole %, 12.0 mole %, 12.1 mole %, 12.2 mole %, 12.3 mole %, 12.4 mole %, 12.5 mole %, 12.6 mole %, 12.7 mole %, 12.8 mole %, 12.9 mole %, 12.0 mole %, 13.1 mole %, 13.2 mole %, 13.3 mole %, 13.4 mole %, 13.5 mole %, 13.6 mole %, 13.7 mole %, 13.8 mole %, 13.9 mole %, or 14.0 mole %; from 3.5 mole % to: 3.6 mole %, 3.7 mole %, 3.8 mole %, 3.9 mole %, 4.0 mole %, 4.1 mole %, 4.2 mole %, 4.3 mole %, 4.4 mole %, 4.5 mole %, 4.6 mole %, 4.7 mole %, 4.8 mole %, 4.9 mole %, 5.0 mole %, 5.1 mole %, 5.2 mole %, 5.3 mole %, 5.4 mole %, 5.5 mole %, 5.6 mole %, 5.7 mole %, 5.8 mole %, 5.9 mole %, 6.0 mole %, 6.1 mole %, 6.2 mole %, 6.3 mole %, 6.4 mole %, 6.5 mole %, 6.6 mole %, 6.7 mole %, 6.8 mole %, 6.9 mole %, 7.0 mole %, 7.1 mole %, 7.2 mole %, 7.3 mole %, 7.4 mole %, 7.5 mole %, 7.6 mole %, 7.7 mole %, 7.8 mole %, 7.9 mole %, 8.0 mole %, 8.1 mole %, 8.2 mole %, 8.3 mole %, 8.4 mole %, 8.5 mole %, 8.6 mole %, 8.7 mole %, 8.8 mole %, 8.9 mole %, 9.0 mole %, 9.1 mole %, 9.2 mole %, 9.3 mole %, 9.4 mole %, 9.5 mole %, 9.6 mole %, 9.7 mole %, 9.8 mole %, 9.9 mole %, 10.0 mole %, 10.1 mole %, 10.2 mole %, 10.3 mole %, 10.4 mole %, 10.5 mole %, 10.6 mole %, 10.7 mole %, 10.8 mole %, 10.9 mole %, 11.0 mole %, 11.1 mole %, 11.2 mole %, 11.3 mole %, 11.4 mole %, 11.5 mole %, 11.6 mole %, 11.7 mole %, 11.8 mole %, 11.9 mole %, 12.0 mole %, 12.1 mole %, 12.2 mole %, 12.3 mole %, 12.4 mole %, 12.5 mole %, 12.6 mole %, 12.7 mole %, 12.8 mole %, 12.9 mole %, 12.0 mole %, 13.1 mole %, 13.2 mole %, 13.3 mole %, 13.4 mole %, 13.5 mole %, 13.6 mole %, 13.7 mole %, 13.8 mole %, 13.9 mole %, or 14.0 mole %; from 3.6 mole % to: 3.7 mole %, 3.8 mole %, 3.9 mole %, 4.0 mole %, 4.1 mole %, 4.2 mole %, 4.3 mole %, 4.4 mole %, 4.5 mole %, 4.6 mole %, 4.7 mole %, 4.8 mole %, 4.9 mole %, 5.0 mole %, 5.1 mole %, 5.2 mole %, 5.3 mole %, 5.4 mole %, 5.5 mole %, 5.6 mole %, 5.7 mole %, 5.8 mole %, 5.9 mole %, 6.0 mole %, 6.1 mole %, 6.2 mole %, 6.3 mole %, 6.4 mole %, 6.5 mole %, 6.6 mole %, 6.7 mole %, 6.8 mole %, 6.9 mole %, 7.0 mole %, 7.1 mole %, 7.2 mole %, 7.3 mole %, 7.4 mole %, 7.5 mole %, 7.6 mole %, 7.7 mole %, 7.8 mole %, 7.9 mole %, 8.0 mole %, 8.1 mole %, 8.2 mole %, 8.3 mole %, 8.4 mole %, 8.5 mole %, 8.6 mole %, 8.7 mole %, 8.8 mole %, 8.9 mole %, 9.0 mole %, 9.1 mole %, 9.2 mole %, 9.3 mole %, 9.4 mole %, 9.5 mole %, 9.6 mole %, 9.7 mole %, 9.8 mole %, 9.9 mole %, 10.0 mole %, 10.1 mole %, 10.2 mole %, 10.3 mole %, 10.4 mole %, 10.5 mole %, 10.6 mole %, 10.7 mole %, 10.8 mole %, 10.9 mole %, 11.0 mole %, 11.1 mole %, 11.2 mole %, 11.3 mole %, 11.4 mole %, 11.5 mole %, 11.6 mole %, 11.7 mole %, 11.8 mole %, 11.9 mole %, 12.0 mole %, 12.1 mole %, 12.2 mole %, 12.3 mole %, 12.4 mole %, 12.5 mole %, 12.6 mole %, 12.7 mole %, 12.8 mole %, 12.9 mole %, 12.0 mole %, 13.1 mole %, 13.2 mole %, 13.3 mole %, 13.4 mole %, 13.5 mole %, 13.6 mole %, 13.7 mole %, 13.8 mole %, 13.9 mole %, or 14.0 mole %; from 3.7 mole % to: 3.8 mole %, 3.9 mole %, 4.0 mole %, 4.1 mole %, 4.2 mole %, 4.3 mole %, 4.4 mole %, 4.5 mole %, 4.6 mole %, 4.7 mole %, 4.8 mole %, 4.9 mole %, 5.0 mole %, 5.1 mole %, 5.2 mole %, 5.3 mole %, 5.4 mole %, 5.5 mole %, 5.6 mole %, 5.7 mole %, 5.8 mole %, 5.9 mole %, 6.0 mole %, 6.1 mole %, 6.2 mole %, 6.3 mole %, 6.4 mole %, 6.5 mole %, 6.6 mole %, 6.7 mole %, 6.8 mole %, 6.9 mole %, 7.0 mole %, 7.1 mole %, 7.2 mole %, 7.3 mole %, 7.4 mole %, 7.5 mole %, 7.6 mole %, 7.7 mole %, 7.8 mole %, 7.9 mole %, 8.0 mole %, 8.1 mole %, 8.2 mole %, 8.3 mole %, 8.4 mole %, 8.5 mole %, 8.6 mole %, 8.7 mole %, 8.8 mole %, 8.9 mole %, 9.0 mole %, 9.1 mole %, 9.2 mole %, 9.3 mole %, 9.4 mole %, 9.5 mole %, 9.6 mole %, 9.7 mole %, 9.8 mole %, 9.9 mole %, 10.0 mole %, 10.1 mole %, 10.2 mole %, 10.3 mole %, 10.4 mole %, 10.5 mole %, 10.6 mole %, 10.7 mole %, 10.8 mole %, 10.9 mole %, 11.0 mole %, 11.1 mole %, 11.2 mole %, 11.3 mole %, 11.4 mole %, 11.5 mole %, 11.6 mole %, 11.7 mole %, 11.8 mole %, 11.9 mole %, 12.0 mole %, 12.1 mole %, 12.2 mole %, 12.3 mole %, 12.4 mole %, 12.5 mole %, 12.6 mole %, 12.7 mole %, 12.8 mole %, 12.9 mole %, 12.0 mole %, 13.1 mole %, 13.2 mole %, 13.3 mole %, 13.4 mole %, 13.5 mole %, 13.6 mole %, 13.7 mole %, 13.8 mole %, 13.9 mole %, or 14.0 mole %; from 3.8 mole % to: 3.9 mole %, 4.0 mole %, 4.1 mole %, 4.2 mole %, 4.3 mole %, 4.4 mole %, 4.5 mole %, 4.6 mole %, 4.7 mole %, 4.8 mole %, 4.9 mole %, 5.0 mole %, 5.1 mole %, 5.2 mole %, 5.3 mole %, 5.4 mole %, 5.5 mole %, 5.6 mole %, 5.7 mole %, 5.8 mole %, 5.9 mole %, 6.0 mole %, 6.1 mole %, 6.2 mole %, 6.3 mole %, 6.4 mole %, 6.5 mole %, 6.6 mole %, 6.7 mole %, 6.8 mole %, 6.9 mole %, 7.0 mole %, 7.1 mole %, 7.2 mole %, 7.3 mole %, 7.4 mole %, 7.5 mole %, 7.6 mole %, 7.7 mole %, 7.8 mole %, 7.9 mole %, 8.0 mole %, 8.1 mole %, 8.2 mole %, 8.3 mole %, 8.4 mole %, 8.5 mole %, 8.6 mole %, 8.7 mole %, 8.8 mole %, 8.9 mole %, 9.0 mole %, 9.1 mole %, 9.2 mole %, 9.3 mole %, 9.4 mole %, 9.5 mole %, 9.6 mole %, 9.7 mole %, 9.8 mole %, 9.9 mole %, 10.0 mole %, 10.1 mole %, 10.2 mole %, 10.3 mole %, 10.4 mole %, 10.5 mole %, 10.6 mole %, 10.7 mole %, 10.8 mole %, 10.9 mole %, 11.0 mole %, 11.1 mole %, 11.2 mole %, 11.3 mole %, 11.4 mole %, 11.5 mole %, 11.6 mole %, 11.7 mole %, 11.8 mole %, 11.9 mole %, 12.0 mole %, 12.1 mole %, 12.2 mole %, 12.3 mole %, 12.4 mole %, 12.5 mole %, 12.6 mole %, 12.7 mole %, 12.8 mole %, 12.9 mole %, 12.0 mole %, 13.1 mole %, 13.2 mole %, 13.3 mole %, 13.4 mole %, 13.5 mole %, 13.6 mole %, 13.7 mole %, 13.8 mole %, 13.9 mole %, or 14.0 mole %; from 3.9 mole % to: 4.0 mole %, 4.1 mole %, 4.2 mole %, 4.3 mole %, 4.4 mole %, 4.5 mole %, 4.6 mole %, 4.7 mole %, 4.8 mole %, 4.9 mole %, 5.0 mole %, 5.1 mole %, 5.2 mole %, 5.3 mole %, 5.4 mole %, 5.5 mole %, 5.6 mole %, 5.7 mole %, 5.8 mole %, 5.9 mole %, 6.0 mole %, 6.1 mole %, 6.2 mole %, 6.3 mole %, 6.4 mole %, 6.5 mole %, 6.6 mole %, 6.7 mole %, 6.8 mole %, 6.9 mole %, 7.0 mole %, 7.1 mole %, 7.2 mole %, 7.3 mole %, 7.4 mole %, 7.5 mole %, 7.6 mole %, 7.7 mole %, 7.8 mole %, 7.9 mole %, 8.0 mole %, 8.1 mole %, 8.2 mole %, 8.3 mole %, 8.4 mole %, 8.5 mole %, 8.6 mole %, 8.7 mole %, 8.8 mole %, 8.9 mole %, 9.0 mole %, 9.1 mole %, 9.2 mole %, 9.3 mole %, 9.4 mole %, 9.5 mole %, 9.6 mole %, 9.7 mole %, 9.8 mole %, 9.9 mole %, 10.0 mole %, 10.1 mole %, 10.2 mole %, 10.3 mole %, 10.4 mole %, 10.5 mole %, 10.6 mole %, 10.7 mole %, 10.8 mole %, 10.9 mole %, 11.0 mole %, 11.1 mole %, 11.2 mole %, 11.3 mole %, 11.4 mole %, 11.5 mole %, 11.6 mole %, 11.7 mole %, 11.8 mole %, 11.9 mole %, 12.0 mole %, 12.1 mole %, 12.2 mole %, 12.3 mole %, 12.4 mole %, 12.5 mole %, 12.6 mole %, 12.7 mole %, 12.8 mole %, 12.9 mole %, 12.0 mole %, 13.1 mole %, 13.2 mole %, 13.3 mole %, 13.4 mole %, 13.5 mole %, 13.6 mole %, 13.7 mole %, 13.8 mole %, 13.9 mole %, or 14.0 mole %; from 4.0 mole % to: 4.1 mole %, 4.2 mole %, 4.3 mole %, 4.4 mole %, 4.5 mole %, 4.6 mole %, 4.7 mole %, 4.8 mole %, 4.9 mole %, 5.0 mole %, 5.1 mole %, 5.2 mole %, 5.3 mole %, 5.4 mole %, 5.5 mole %, 5.6 mole %, 5.7 mole %, 5.8 mole %, 5.9 mole %, 6.0 mole %, 6.1 mole %, 6.2 mole %, 6.3 mole %, 6.4 mole %, 6.5 mole %, 6.6 mole %, 6.7 mole %, 6.8 mole %, 6.9 mole %, 7.0 mole %, 7.1 mole %, 7.2 mole %, 7.3 mole %, 7.4 mole %, 7.5 mole %, 7.6 mole %, 7.7 mole %, 7.8 mole %, 7.9 mole %, 8.0 mole %, 8.1 mole %, 8.2 mole %, 8.3 mole %, 8.4 mole %, 8.5 mole %, 8.6 mole %, 8.7 mole %, 8.8 mole %, 8.9 mole %, 9.0 mole %, 9.1 mole %, 9.2 mole %, 9.3 mole %, 9.4 mole %, 9.5 mole %, 9.6 mole %, 9.7 mole %, 9.8 mole %, 9.9 mole %, 10.0 mole %, 10.1 mole %, 10.2 mole %, 10.3 mole %, 10.4 mole %, 10.5 mole %, 10.6 mole %, 10.7 mole %, 10.8 mole %, 10.9 mole %, 11.0 mole %, 11.1 mole %, 11.2 mole %, 11.3 mole %, 11.4 mole %, 11.5 mole %, 11.6 mole %, 11.7 mole %, 11.8 mole %, 11.9 mole %, 12.0 mole %, 12.1 mole %, 12.2 mole %, 12.3 mole %, 12.4 mole %, 12.5 mole %, 12.6 mole %, 12.7 mole %, 12.8 mole %, 12.9 mole %, 12.0 mole %, 13.1 mole %, 13.2 mole %, 13.3 mole %, 13.4 mole %, 13.5 mole %, 13.6 mole %, 13.7 mole %, 13.8 mole %, 13.9 mole %, or 14.0 mole %; from 4.1 mole % to: 4.1 mole %, 4.2 mole %, 4.3 mole %, 4.4 mole %, 4.5 mole %, 4.6 mole %, 4.7 mole %, 4.8 mole %, 4.9 mole %, 5.0 mole %, 5.1 mole %, 5.2 mole %, 5.3 mole %, 5.4 mole %, 5.5 mole %, 5.6 mole %, 5.7 mole %, 5.8 mole %, 5.9 mole %, 6.0 mole %, 6.1 mole %, 6.2 mole %, 6.3 mole %, 6.4 mole %, 6.5 mole %, 6.6 mole %, 6.7 mole %, 6.8 mole %, 6.9 mole %, 7.0 mole %, 7.1 mole %, 7.2 mole %, 7.3 mole %, 7.4 mole %, 7.5 mole %, 7.6 mole %, 7.7 mole %, 7.8 mole %, 7.9 mole %, 8.0 mole %, 8.1 mole %, 8.2 mole %, 8.3 mole %, 8.4 mole %, 8.5 mole %, 8.6 mole %, 8.7 mole %, 8.8 mole %, 8.9 mole %, 9.0 mole %, 9.1 mole %, 9.2 mole %, 9.3 mole %, 9.4 mole %, 9.5 mole %, 9.6 mole %, 9.7 mole %, 9.8 mole %, 9.9 mole %, 10.0 mole %, 10.1 mole %, 10.2 mole %, 10.3 mole %, 10.4 mole %, 10.5 mole %, 10.6 mole %, 10.7 mole %, 10.8 mole %, 10.9 mole %, 11.0 mole %, 11.1 mole %, 11.2 mole %, 11.3 mole %, 11.4 mole %, 11.5 mole %, 11.6 mole %, 11.7 mole %, 11.8 mole %, 11.9 mole %, 12.0 mole %, 12.1 mole %, 12.2 mole %, 12.3 mole %, 12.4 mole %, 12.5 mole %, 12.6 mole %, 12.7 mole %, 12.8 mole %, 12.9 mole %, 12.0 mole %, 13.1 mole %, 13.2 mole %, 13.3 mole %, 13.4 mole %, 13.5 mole %, 13.6 mole %, 13.7 mole %, 13.8 mole %, 13.9 mole %, or 14.0 mole %; from 4.2 mole % to: 4.3 mole %, 4.4 mole %, 4.5 mole %, 4.6 mole %, 4.7 mole %, 4.8 mole %, 4.9 mole %, 5.0 mole %, 5.1 mole %, 5.2 mole %, 5.3 mole %, 5.4 mole %, 5.5 mole %, 5.6 mole %, 5.7 mole %, 5.8 mole %, 5.9 mole %, 6.0 mole %, 6.1 mole %, 6.2 mole %, 6.3 mole %, 6.4 mole %, 6.5 mole %, 6.6 mole %, 6.7 mole %, 6.8 mole %, 6.9 mole %, 7.0 mole %, 7.1 mole %, 7.2 mole %, 7.3 mole %, 7.4 mole %, 7.5 mole %, 7.6 mole %, 7.7 mole %, 7.8 mole %, 7.9 mole %, 8.0 mole %, 8.1 mole %, 8.2 mole %, 8.3 mole %, 8.4 mole %, 8.5 mole %, 8.6 mole %, 8.7 mole %, 8.8 mole %, 8.9 mole %, 9.0 mole %, 9.1 mole %, 9.2 mole %, 9.3 mole %, 9.4 mole %, 9.5 mole %, 9.6 mole %, 9.7 mole %, 9.8 mole %, 9.9 mole %, 10.0 mole %, 10.1 mole %, 10.2 mole %, 10.3 mole %, 10.4 mole %, 10.5 mole %, 10.6 mole %, 10.7 mole %, 10.8 mole %, 10.9 mole %, 11.0 mole %, 11.1 mole %, 11.2 mole %, 11.3 mole %, 11.4 mole %, 11.5 mole %, 11.6 mole %, 11.7 mole %, 11.8 mole %, 11.9 mole %, 12.0 mole %, 12.1 mole %, 12.2 mole %, 12.3 mole %, 12.4 mole %, 12.5 mole %, 12.6 mole %, 12.7 mole %, 12.8 mole %, 12.9 mole %, 12.0 mole %, 13.1 mole %, 13.2 mole %, 13.3 mole %, 13.4 mole %, 13.5 mole %, 13.6 mole %, 13.7 mole %, 13.8 mole %, 13.9 mole %, or 14.0 mole %; from 4.3 mole % to: 4.4 mole %, 4.5 mole %, 4.6 mole %, 4.7 mole %, 4.8 mole %, 4.9 mole %, 5.0 mole %, 5.1 mole %, 5.2 mole %, 5.3 mole %, 5.4 mole %, 5.5 mole %, 5.6 mole %, 5.7 mole %, 5.8 mole %, 5.9 mole %, 6.0 mole %, 6.1 mole %, 6.2 mole %, 6.3 mole %, 6.4 mole %, 6.5 mole %, 6.6 mole %, 6.7 mole %, 6.8 mole %, 6.9 mole %, 7.0 mole %, 7.1 mole %, 7.2 mole %, 7.3 mole %, 7.4 mole %, 7.5 mole %, 7.6 mole %, 7.7 mole %, 7.8 mole %, 7.9 mole %, 8.0 mole %, 8.1 mole %, 8.2 mole %, 8.3 mole %, 8.4 mole %, 8.5 mole %, 8.6 mole %, 8.7 mole %, 8.8 mole %, 8.9 mole %, 9.0 mole %, 9.1 mole %, 9.2 mole %, 9.3 mole %, 9.4 mole %, 9.5 mole %, 9.6 mole %, 9.7 mole %, 9.8 mole %, 9.9 mole %, 10.0 mole %, 10.1 mole %, 10.2 mole %, 10.3 mole %, 10.4 mole %, 10.5 mole %, 10.6 mole %, 10.7 mole %, 10.8 mole %, 10.9 mole %, 11.0 mole %, 11.1 mole %, 11.2 mole %, 11.3 mole %, 11.4 mole %, 11.5 mole %, 11.6 mole %, 11.7 mole %, 11.8 mole %, 11.9 mole %, 12.0 mole %, 12.1 mole %, 12.2 mole %, 12.3 mole %, 12.4 mole %, 12.5 mole %, 12.6 mole %, 12.7 mole %, 12.8 mole %, 12.9 mole %, 12.0 mole %, 13.1 mole %, 13.2 mole %, 13.3 mole %, 13.4 mole %, 13.5 mole %, 13.6 mole %, 13.7 mole %, 13.8 mole %, 13.9 mole %, or 14.0 mole %; from 4.4 mole % to: 4.5 mole %, 4.6 mole %, 4.7 mole %, 4.8 mole %, 4.9 mole %, 5.0 mole %, 5.1 mole %, 5.2 mole %, 5.3 mole %, 5.4 mole %, 5.5 mole %, 5.6 mole %, 5.7 mole %, 5.8 mole %, 5.9 mole %, 6.0 mole %, 6.1 mole %, 6.2 mole %, 6.3 mole %, 6.4 mole %, 6.5 mole %, 6.6 mole %, 6.7 mole %, 6.8 mole %, 6.9 mole %, 7.0 mole %, 7.1 mole %, 7.2 mole %, 7.3 mole %, 7.4 mole %, 7.5 mole %, 7.6 mole %, 7.7 mole %, 7.8 mole %, 7.9 mole %, 8.0 mole %, 8.1 mole %, 8.2 mole %, 8.3 mole %, 8.4 mole %, 8.5 mole %, 8.6 mole %, 8.7 mole %, 8.8 mole %, 8.9 mole %, 9.0 mole %, 9.1 mole %, 9.2 mole %, 9.3 mole %, 9.4 mole %, 9.5 mole %, 9.6 mole %, 9.7 mole %, 9.8 mole %, 9.9 mole %, 10.0 mole %, 10.1 mole %, 10.2 mole %, 10.3 mole %, 10.4 mole %, 10.5 mole %, 10.6 mole %, 10.7 mole %, 10.8 mole %, 10.9 mole %, 11.0 mole %, 11.1 mole %, 11.2 mole %, 11.3 mole %, 11.4 mole %, 11.5 mole %, 11.6 mole %, 11.7 mole %, 11.8 mole %, 11.9 mole %, 12.0 mole %, 12.1 mole %, 12.2 mole %, 12.3 mole %, 12.4 mole %, 12.5 mole %, 12.6 mole %, 12.7 mole %, 12.8 mole %, 12.9 mole %, 12.0 mole %, 13.1 mole %, 13.2 mole %, 13.3 mole %, 13.4 mole %, 13.5 mole %, 13.6 mole %, 13.7 mole %, 13.8 mole %, 13.9 mole %, or 14.0 mole %; from 4.5 mole % to: 4.6 mole %, 4.7 mole %, 4.8 mole %, 4.9 mole %, 5.0 mole %, 5.1 mole %, 5.2 mole %, 5.3 mole %, 5.4 mole %, 5.5 mole %, 5.6 mole %, 5.7 mole %, 5.8 mole %, 5.9 mole %, 6.0 mole %, 6.1 mole %, 6.2 mole %, 6.3 mole %, 6.4 mole %, 6.5 mole %, 6.6 mole %, 6.7 mole %, 6.8 mole %, 6.9 mole %, 7.0 mole %, 7.1 mole %, 7.2 mole %, 7.3 mole %, 7.4 mole %, 7.5 mole %, 7.6 mole %, 7.7 mole %, 7.8 mole %, 7.9 mole %, 8.0 mole %, 8.1 mole %, 8.2 mole %, 8.3 mole %, 8.4 mole %, 8.5 mole %, 8.6 mole %, 8.7 mole %, 8.8 mole %, 8.9 mole %, 9.0 mole %, 9.1 mole %, 9.2 mole %, 9.3 mole %, 9.4 mole %, 9.5 mole %, 9.6 mole %, 9.7 mole %, 9.8 mole %, 9.9 mole %, 10.0 mole %, 10.1 mole %, 10.2 mole %, 10.3 mole %, 10.4 mole %, 10.5 mole %, 10.6 mole %, 10.7 mole %, 10.8 mole %, 10.9 mole %, 11.0 mole %, 11.1 mole %, 11.2 mole %, 11.3 mole %, 11.4 mole %, 11.5 mole %, 11.6 mole %, 11.7 mole %, 11.8 mole %, 11.9 mole %, 12.0 mole %, 12.1 mole %, 12.2 mole %, 12.3 mole %, 12.4 mole %, 12.5 mole %, 12.6 mole %, 12.7 mole %, 12.8 mole %, 12.9 mole %, 12.0 mole %, 13.1 mole %, 13.2 mole %, 13.3 mole %, 13.4 mole %, 13.5 mole %, 13.6 mole %, 13.7 mole %, 13.8 mole %, 13.9 mole %, or 14.0 mole %; from 4.6 mole % to: 4.7 mole %, 4.8 mole %, 4.9 mole %, 5.0 mole %, 5.1 mole %, 5.2 mole %, 5.3 mole %, 5.4 mole %, 5.5 mole %, 5.6 mole %, 5.7 mole %, 5.8 mole %, 5.9 mole %, 6.0 mole %, 6.1 mole %, 6.2 mole %, 6.3 mole %, 6.4 mole %, 6.5 mole %, 6.6 mole %, 6.7 mole %, 6.8 mole %, 6.9 mole %, 7.0 mole %, 7.1 mole %, 7.2 mole %, 7.3 mole %, 7.4 mole %, 7.5 mole %, 7.6 mole %, 7.7 mole %, 7.8 mole %, 7.9 mole %, 8.0 mole %, 8.1 mole %, 8.2 mole %, 8.3 mole %, 8.4 mole %, 8.5 mole %, 8.6 mole %, 8.7 mole %, 8.8 mole %, 8.9 mole %, 9.0 mole %, 9.1 mole %, 9.2 mole %, 9.3 mole %, 9.4 mole %, 9.5 mole %, 9.6 mole %, 9.7 mole %, 9.8 mole %, 9.9 mole %, 10.0 mole %, 10.1 mole %, 10.2 mole %, 10.3 mole %, 10.4 mole %, 10.5 mole %, 10.6 mole %, 10.7 mole %, 10.8 mole %, 10.9 mole %, 11.0 mole %, 11.1 mole %, 11.2 mole %, 11.3 mole %, 11.4 mole %, 11.5 mole %, 11.6 mole %, 11.7 mole %, 11.8 mole %, 11.9 mole %, 12.0 mole %, 12.1 mole %, 12.2 mole %, 12.3 mole %, 12.4 mole %, 12.5 mole %, 12.6 mole %, 12.7 mole %, 12.8 mole %, 12.9 mole %, 12.0 mole %, 13.1 mole %, 13.2 mole %, 13.3 mole %, 13.4 mole %, 13.5 mole %, 13.6 mole %, 13.7 mole %, 13.8 mole %, 13.9 mole %, or 14.0 mole %; from 4.7 mole % to: 4.8 mole %, 4.9 mole %, 5.0 mole %, 5.1 mole %, 5.2 mole %, 5.3 mole %, 5.4 mole %, 5.5 mole %, 5.6 mole %, 5.7 mole %, 5.8 mole %, 5.9 mole %, 6.0 mole %, 6.1 mole %, 6.2 mole %, 6.3 mole %, 6.4 mole %, 6.5 mole %, 6.6 mole %, 6.7 mole %, 6.8 mole %, 6.9 mole %, 7.0 mole %, 7.1 mole %, 7.2 mole %, 7.3 mole %, 7.4 mole %, 7.5 mole %, 7.6 mole %, 7.7 mole %, 7.8 mole %, 7.9 mole %, 8.0 mole %, 8.1 mole %, 8.2 mole %, 8.3 mole %, 8.4 mole %, 8.5 mole %, 8.6 mole %, 8.7 mole %, 8.8 mole %, 8.9 mole %, 9.0 mole %, 9.1 mole %, 9.2 mole %, 9.3 mole %, 9.4 mole %, 9.5 mole %, 9.6 mole %, 9.7 mole %, 9.8 mole %, 9.9 mole %, 10.0 mole %, 10.1 mole %, 10.2 mole %, 10.3 mole %, 10.4 mole %, 10.5 mole %, 10.6 mole %, 10.7 mole %, 10.8 mole %, 10.9 mole %, 11.0 mole %, 11.1 mole %, 11.2 mole %, 11.3 mole %, 11.4 mole %, 11.5 mole %, 11.6 mole %, 11.7 mole %, 11.8 mole %, 11.9 mole %, 12.0 mole %, 12.1 mole %, 12.2 mole %, 12.3 mole %, 12.4 mole %, 12.5 mole %, 12.6 mole %, 12.7 mole %, 12.8 mole %, 12.9 mole %, 12.0 mole %, 13.1 mole %, 13.2 mole %, 13.3 mole %, 13.4 mole %, 13.5 mole %, 13.6 mole %, 13.7 mole %, 13.8 mole %, 13.9 mole %, or 14.0 mole %; from 4.8 mole % to: 4.9 mole %, 5.0 mole %, 5.1 mole %, 5.2 mole %, 5.3 mole %, 5.4 mole %, 5.5 mole %, 5.6 mole %, 5.7 mole %, 5.8 mole %, 5.9 mole %, 6.0 mole %, 6.1 mole %, 6.2 mole %, 6.3 mole %, 6.4 mole %, 6.5 mole %, 6.6 mole %, 6.7 mole %, 6.8 mole %, 6.9 mole %, 7.0 mole %, 7.1 mole %, 7.2 mole %, 7.3 mole %, 7.4 mole %, 7.5 mole %, 7.6 mole %, 7.7 mole %, 7.8 mole %, 7.9 mole %, 8.0 mole %, 8.1 mole %, 8.2 mole %, 8.3 mole %, 8.4 mole %, 8.5 mole %, 8.6 mole %, 8.7 mole %, 8.8 mole %, 8.9 mole %, 9.0 mole %, 9.1 mole %, 9.2 mole %, 9.3 mole %, 9.4 mole %, 9.5 mole %, 9.6 mole %, 9.7 mole %, 9.8 mole %, 9.9 mole %, 10.0 mole %, 10.1 mole %, 10.2 mole %, 10.3 mole %, 10.4 mole %, 10.5 mole %, 10.6 mole %, 10.7 mole %, 10.8 mole %, 10.9 mole %, 11.0 mole %, 11.1 mole %, 11.2 mole %, 11.3 mole %, 11.4 mole %, 11.5 mole %, 11.6 mole %, 11.7 mole %, 11.8 mole %, 11.9 mole %, 12.0 mole %, 12.1 mole %, 12.2 mole %, 12.3 mole %, 12.4 mole %, 12.5 mole %, 12.6 mole %, 12.7 mole %, 12.8 mole %, 12.9 mole %, 12.0 mole %, 13.1 mole %, 13.2 mole %, 13.3 mole %, 13.4 mole %, 13.5 mole %, 13.6 mole %, 13.7 mole %, 13.8 mole %, 13.9 mole %, or 14.0 mole %; from 4.9 mole % to: 5.0 mole %, 5.1 mole %, 5.2 mole %, 5.3 mole %, 5.4 mole %, 5.5 mole %, 5.6 mole %, 5.7 mole %, 5.8 mole %, 5.9 mole %, 6.0 mole %, 6.1 mole %, 6.2 mole %, 6.3 mole %, 6.4 mole %, 6.5 mole %, 6.6 mole %, 6.7 mole %, 6.8 mole %, 6.9 mole %, 7.0 mole %, 7.1 mole %, 7.2 mole %, 7.3 mole %, 7.4 mole %, 7.5 mole %, 7.6 mole %, 7.7 mole %, 7.8 mole %, 7.9 mole %, 8.0 mole %, 8.1 mole %, 8.2 mole %, 8.3 mole %, 8.4 mole %, 8.5 mole %, 8.6 mole %, 8.7 mole %, 8.8 mole %, 8.9 mole %, 9.0 mole %, 9.1 mole %, 9.2 mole %, 9.3 mole %, 9.4 mole %, 9.5 mole %, 9.6 mole %, 9.7 mole %, 9.8 mole %, 9.9 mole %, 10.0 mole %, 10.1 mole %, 10.2 mole %, 10.3 mole %, 10.4 mole %, 10.5 mole %, 10.6 mole %, 10.7 mole %, 10.8 mole %, 10.9 mole %, 11.0 mole %, 11.1 mole %, 11.2 mole %, 11.3 mole %, 11.4 mole %, 11.5 mole %, 11.6 mole %, 11.7 mole %, 11.8 mole %, 11.9 mole %, 12.0 mole %, 12.1 mole %, 12.2 mole %, 12.3 mole %, 12.4 mole %, 12.5 mole %, 12.6 mole %, 12.7 mole %, 12.8 mole %, 12.9 mole %, 12.0 mole %, 13.1 mole %, 13.2 mole %, 13.3 mole %, 13.4 mole %, 13.5 mole %, 13.6 mole %, 13.7 mole %, 13.8 mole %, 13.9 mole %, or 14.0 mole %; from 5.0 mole % to: 5.1 mole %, 5.2 mole %, 5.3 mole %, 5.4 mole %, 5.5 mole %, 5.6 mole %, 5.7 mole %, 5.8 mole %, 5.9 mole %, 6.0 mole %, 6.1 mole %, 6.2 mole %, 6.3 mole %, 6.4 mole %, 6.5 mole %, 6.6 mole %, 6.7 mole %, 6.8 mole %, 6.9 mole %, 7.0 mole %, 7.1 mole %, 7.2 mole %, 7.3 mole %, 7.4 mole %, 7.5 mole %, 7.6 mole %, 7.7 mole %, 7.8 mole %, 7.9 mole %, 8.0 mole %, 8.1 mole %, 8.2 mole %, 8.3 mole %, 8.4 mole %, 8.5 mole %, 8.6 mole %, 8.7 mole %, 8.8 mole %, 8.9 mole %, 9.0 mole %, 9.1 mole %, 9.2 mole %, 9.3 mole %, 9.4 mole %, 9.5 mole %, 9.6 mole %, 9.7 mole %, 9.8 mole %, 9.9 mole %, 10.0 mole %, 10.1 mole %, 10.2 mole %, 10.3 mole %, 10.4 mole %, 10.5 mole %, 10.6 mole %, 10.7 mole %, 10.8 mole %, 10.9 mole %, 11.0 mole %, 11.1 mole %, 11.2 mole %, 11.3 mole %, 11.4 mole %, 11.5 mole %, 11.6 mole %, 11.7 mole %, 11.8 mole %, 11.9 mole %, 12.0 mole %, 12.1 mole %, 12.2 mole %, 12.3 mole %, 12.4 mole %, 12.5 mole %, 12.6 mole %, 12.7 mole %, 12.8 mole %, 12.9 mole %, 12.0 mole %, 13.1 mole %, 13.2 mole %, 13.3 mole %, 13.4 mole %, 13.5 mole %, 13.6 mole %, 13.7 mole %, 13.8 mole %, 13.9 mole %, or 14.0 mole %; from 5.1 mole % to: 5.2 mole %, 5.3 mole %, 5.4 mole %, 5.5 mole %, 5.6 mole %, 5.7 mole %, 5.8 mole %, 5.9 mole %, 6.0 mole %, 6.1 mole %, 6.2 mole %, 6.3 mole %, 6.4 mole %, 6.5 mole %, 6.6 mole %, 6.7 mole %, 6.8 mole %, 6.9 mole %, 7.0 mole %, 7.1 mole %, 7.2 mole %, 7.3 mole %, 7.4 mole %, 7.5 mole %, 7.6 mole %, 7.7 mole %, 7.8 mole %, 7.9 mole %, 8.0 mole %, 8.1 mole %, 8.2 mole %, 8.3 mole %, 8.4 mole %, 8.5 mole %, 8.6 mole %, 8.7 mole %, 8.8 mole %, 8.9 mole %, 9.0 mole %, 9.1 mole %, 9.2 mole %, 9.3 mole %, 9.4 mole %, 9.5 mole %, 9.6 mole %, 9.7 mole %, 9.8 mole %, 9.9 mole %, 10.0 mole %, 10.1 mole %, 10.2 mole %, 10.3 mole %, 10.4 mole %, 10.5 mole %, 10.6 mole %, 10.7 mole %, 10.8 mole %, 10.9 mole %, 11.0 mole %, 11.1 mole %, 11.2 mole %, 11.3 mole %, 11.4 mole %, 11.5 mole %, 11.6 mole %, 11.7 mole %, 11.8 mole %, 11.9 mole %, 12.0 mole %, 12.1 mole %, 12.2 mole %, 12.3 mole %, 12.4 mole %, 12.5 mole %, 12.6 mole %, 12.7 mole %, 12.8 mole %, 12.9 mole %, 12.0 mole %, 13.1 mole %, 13.2 mole %, 13.3 mole %, 13.4 mole %, 13.5 mole %, 13.6 mole %, 13.7 mole %, 13.8 mole %, 13.9 mole %, or 14.0 mole %; from 5.2 mole % to: 5.3 mole %, 5.4 mole %, 5.5 mole %, 5.6 mole %, 5.7 mole %, 5.8 mole %, 5.9 mole %, 6.0 mole %, 6.1 mole %, 6.2 mole %, 6.3 mole %, 6.4 mole %, 6.5 mole %, 6.6 mole %, 6.7 mole %, 6.8 mole %, 6.9 mole %, 7.0 mole %, 7.1 mole %, 7.2 mole %, 7.3 mole %, 7.4 mole %, 7.5 mole %, 7.6 mole %, 7.7 mole %, 7.8 mole %, 7.9 mole %, 8.0 mole %, 8.1 mole %, 8.2 mole %, 8.3 mole %, 8.4 mole %, 8.5 mole %, 8.6 mole %, 8.7 mole %, 8.8 mole %, 8.9 mole %, 9.0 mole %, 9.1 mole %, 9.2 mole %, 9.3 mole %, 9.4 mole %, 9.5 mole %, 9.6 mole %, 9.7 mole %, 9.8 mole %, 9.9 mole %, 10.0 mole %, 10.1 mole %, 10.2 mole %, 10.3 mole %, 10.4 mole %, 10.5 mole %, 10.6 mole %, 10.7 mole %, 10.8 mole %, 10.9 mole %, 11.0 mole %, 11.1 mole %, 11.2 mole %, 11.3 mole %, 11.4 mole %, 11.5 mole %, 11.6 mole %, 11.7 mole %, 11.8 mole %, 11.9 mole %, 12.0 mole %, 12.1 mole %, 12.2 mole %, 12.3 mole %, 12.4 mole %, 12.5 mole %, 12.6 mole %, 12.7 mole %, 12.8 mole %, 12.9 mole %, 12.0 mole %, 13.1 mole %, 13.2 mole %, 13.3 mole %, 13.4 mole %, 13.5 mole %, 13.6 mole %, 13.7 mole %, 13.8 mole %, 13.9 mole %, or 14.0 mole %; from 5.3 mole % to: 5.4 mole %, 5.5 mole %, 5.6 mole %, 5.7 mole %, 5.8 mole %, 5.9 mole %, 6.0 mole %, 6.1 mole %, 6.2 mole %, 6.3 mole %, 6.4 mole %, 6.5 mole %, 6.6 mole %, 6.7 mole %, 6.8 mole %, 6.9 mole %, 7.0 mole %, 7.1 mole %, 7.2 mole %, 7.3 mole %, 7.4 mole %, 7.5 mole %, 7.6 mole %, 7.7 mole %, 7.8 mole %, 7.9 mole %, 8.0 mole %, 8.1 mole %, 8.2 mole %, 8.3 mole %, 8.4 mole %, 8.5 mole %, 8.6 mole %, 8.7 mole %, 8.8 mole %, 8.9 mole %, 9.0 mole %, 9.1 mole %, 9.2 mole %, 9.3 mole %, 9.4 mole %, 9.5 mole %, 9.6 mole %, 9.7 mole %, 9.8 mole %, 9.9 mole %, 10.0 mole %, 10.1 mole %, 10.2 mole %, 10.3 mole %, 10.4 mole %, 10.5 mole %, 10.6 mole %, 10.7 mole %, 10.8 mole %, 10.9 mole %, 11.0 mole %, 11.1 mole %, 11.2 mole %, 11.3 mole %, 11.4 mole %, 11.5 mole %, 11.6 mole %, 11.7 mole %, 11.8 mole %, 11.9 mole %, 12.0 mole %, 12.1 mole %, 12.2 mole %, 12.3 mole %, 12.4 mole %, 12.5 mole %, 12.6 mole %, 12.7 mole %, 12.8 mole %, 12.9 mole %, 12.0 mole %, 13.1 mole %, 13.2 mole %, 13.3 mole %, 13.4 mole %, 13.5 mole %, 13.6 mole %, 13.7 mole %, 13.8 mole %, 13.9 mole %, or 14.0 mole %; from 5.4 mole % to: 5.5 mole %, 5.6 mole %, 5.7 mole %, 5.8 mole %, 5.9 mole %, 6.0 mole %, 6.1 mole %, 6.2 mole %, 6.3 mole %, 6.4 mole %, 6.5 mole %, 6.6 mole %, 6.7 mole %, 6.8 mole %, 6.9 mole %, 7.0 mole %, 7.1 mole %, 7.2 mole %, 7.3 mole %, 7.4 mole %, 7.5 mole %, 7.6 mole %, 7.7 mole %, 7.8 mole %, 7.9 mole %, 8.0 mole %, 8.1 mole %, 8.2 mole %, 8.3 mole %, 8.4 mole %, 8.5 mole %, 8.6 mole %, 8.7 mole %, 8.8 mole %, 8.9 mole %, 9.0 mole %, 9.1 mole %, 9.2 mole %, 9.3 mole %, 9.4 mole %, 9.5 mole %, 9.6 mole %, 9.7 mole %, 9.8 mole %, 9.9 mole %, 10.0 mole %, 10.1 mole %, 10.2 mole %, 10.3 mole %, 10.4 mole %, 10.5 mole %, 10.6 mole %, 10.7 mole %, 10.8 mole %, 10.9 mole %, 11.0 mole %, 11.1 mole %, 11.2 mole %, 11.3 mole %, 11.4 mole %, 11.5 mole %, 11.6 mole %, 11.7 mole %, 11.8 mole %, 11.9 mole %, 12.0 mole %, 12.1 mole %, 12.2 mole %, 12.3 mole %, 12.4 mole %, 12.5 mole %, 12.6 mole %, 12.7 mole %, 12.8 mole %, 12.9 mole %, 12.0 mole %, 13.1 mole %, 13.2 mole %, 13.3 mole %, 13.4 mole %, 13.5 mole %, 13.6 mole %, 13.7 mole %, 13.8 mole %, 13.9 mole %, or 14.0 mole %; from 5.5 mole % to: 5.6 mole %, 5.7 mole %, 5.8 mole %, 5.9 mole %, 6.0 mole %, 6.1 mole %, 6.2 mole %, 6.3 mole %, 6.4 mole %, 6.5 mole %, 6.6 mole %, 6.7 mole %, 6.8 mole %, 6.9 mole %, 7.0 mole %, 7.1 mole %, 7.2 mole %, 7.3 mole %, 7.4 mole %, 7.5 mole %, 7.6 mole %, 7.7 mole %, 7.8 mole %, 7.9 mole %, 8.0 mole %, 8.1 mole %, 8.2 mole %, 8.3 mole %, 8.4 mole %, 8.5 mole %, 8.6 mole %, 8.7 mole %, 8.8 mole %, 8.9 mole %, 9.0 mole %, 9.1 mole %, 9.2 mole %, 9.3 mole %, 9.4 mole %, 9.5 mole %, 9.6 mole %, 9.7 mole %, 9.8 mole %, 9.9 mole %, 10.0 mole %, 10.1 mole %, 10.2 mole %, 10.3 mole %, 10.4 mole %, 10.5 mole %, 10.6 mole %, 10.7 mole %, 10.8 mole %, 10.9 mole %, 11.0 mole %, 11.1 mole %, 11.2 mole %, 11.3 mole %, 11.4 mole %, 11.5 mole %, 11.6 mole %, 11.7 mole %, 11.8 mole %, 11.9 mole %, 12.0 mole %, 12.1 mole %, 12.2 mole %, 12.3 mole %, 12.4 mole %, 12.5 mole %, 12.6 mole %, 12.7 mole %, 12.8 mole %, 12.9 mole %, 12.0 mole %, 13.1 mole %, 13.2 mole %, 13.3 mole %, 13.4 mole %, 13.5 mole %, 13.6 mole %, 13.7 mole %, 13.8 mole %, 13.9 mole %, or 14.0 mole %; from 5.6 mole % to: 5.7 mole %, 5.8 mole %, 5.9 mole %, 6.0 mole %, 6.1 mole %, 6.2 mole %, 6.3 mole %, 6.4 mole %, 6.5 mole %, 6.6 mole %, 6.7 mole %, 6.8 mole %, 6.9 mole %, 7.0 mole %, 7.1 mole %, 7.2 mole %, 7.3 mole %, 7.4 mole %, 7.5 mole %, 7.6 mole %, 7.7 mole %, 7.8 mole %, 7.9 mole %, 8.0 mole %, 8.1 mole %, 8.2 mole %, 8.3 mole %, 8.4 mole %, 8.5 mole %, 8.6 mole %, 8.7 mole %, 8.8 mole %, 8.9 mole %, 9.0 mole %, 9.1 mole %, 9.2 mole %, 9.3 mole %, 9.4 mole %, 9.5 mole %, 9.6 mole %, 9.7 mole %, 9.8 mole %, 9.9 mole %, 10.0 mole %, 10.1 mole %, 10.2 mole %, 10.3 mole %, 10.4 mole %, 10.5 mole %, 10.6 mole %, 10.7 mole %, 10.8 mole %, 10.9 mole %, 11.0 mole %, 11.1 mole %, 11.2 mole %, 11.3 mole %, 11.4 mole %, 11.5 mole %, 11.6 mole %, 11.7 mole %, 11.8 mole %, 11.9 mole %, 12.0 mole %, 12.1 mole %, 12.2 mole %, 12.3 mole %, 12.4 mole %, 12.5 mole %, 12.6 mole %, 12.7 mole %, 12.8 mole %, 12.9 mole %, 12.0 mole %, 13.1 mole %, 13.2 mole %, 13.3 mole %, 13.4 mole %, 13.5 mole %, 13.6 mole %, 13.7 mole %, 13.8 mole %, 13.9 mole %, or 14.0 mole %; from 5.7 mole % to: 5.8 mole %, 5.9 mole %, 6.0 mole %, 6.1 mole %, 6.2 mole %, 6.3 mole %, 6.4 mole %, 6.5 mole %, 6.6 mole %, 6.7 mole %, 6.8 mole %, 6.9 mole %, 7.0 mole %, 7.1 mole %, 7.2 mole %, 7.3 mole %, 7.4 mole %, 7.5 mole %, 7.6 mole %, 7.7 mole %, 7.8 mole %, 7.9 mole %, 8.0 mole %, 8.1 mole %, 8.2 mole %, 8.3 mole %, 8.4 mole %, 8.5 mole %, 8.6 mole %, 8.7 mole %, 8.8 mole %, 8.9 mole %, 9.0 mole %, 9.1 mole %, 9.2 mole %, 9.3 mole %, 9.4 mole %, 9.5 mole %, 9.6 mole %, 9.7 mole %, 9.8 mole %, 9.9 mole %, 10.0 mole %, 10.1 mole %, 10.2 mole %, 10.3 mole %, 10.4 mole %, 10.5 mole %, 10.6 mole %, 10.7 mole %, 10.8 mole %, 10.9 mole %, 11.0 mole %, 11.1 mole %, 11.2 mole %, 11.3 mole %, 11.4 mole %, 11.5 mole %, 11.6 mole %, 11.7 mole %, 11.8 mole %, 11.9 mole %, 12.0 mole %, 12.1 mole %, 12.2 mole %, 12.3 mole %, 12.4 mole %, 12.5 mole %, 12.6 mole %, 12.7 mole %, 12.8 mole %, 12.9 mole %, 12.0 mole %, 13.1 mole %, 13.2 mole %, 13.3 mole %, 13.4 mole %, 13.5 mole %, 13.6 mole %, 13.7 mole %, 13.8 mole %, 13.9 mole %, or 14.0 mole %; from 5.8 mole % to: 5.9 mole %, 6.0 mole %, 6.1 mole %, 6.2 mole %, 6.3 mole %, 6.4 mole %, 6.5 mole %, 6.6 mole %, 6.7 mole %, 6.8 mole %, 6.9 mole %, 7.0 mole %, 7.1 mole %, 7.2 mole %, 7.3 mole %, 7.4 mole %, 7.5 mole %, 7.6 mole %, 7.7 mole %, 7.8 mole %, 7.9 mole %, 8.0 mole %, 8.1 mole %, 8.2 mole %, 8.3 mole %, 8.4 mole %, 8.5 mole %, 8.6 mole %, 8.7 mole %, 8.8 mole %, 8.9 mole %, 9.0 mole %, 9.1 mole %, 9.2 mole %, 9.3 mole %, 9.4 mole %, 9.5 mole %, 9.6 mole %, 9.7 mole %, 9.8 mole %, 9.9 mole %, 10.0 mole %, 10.1 mole %, 10.2 mole %, 10.3 mole %, 10.4 mole %, 10.5 mole %, 10.6 mole %, 10.7 mole %, 10.8 mole %, 10.9 mole %, 11.0 mole %, 11.1 mole %, 11.2 mole %, 11.3 mole %, 11.4 mole %, 11.5 mole %, 11.6 mole %, 11.7 mole %, 11.8 mole %, 11.9 mole %, 12.0 mole %, 12.1 mole %, 12.2 mole %, 12.3 mole %, 12.4 mole %, 12.5 mole %, 12.6 mole %, 12.7 mole %, 12.8 mole %, 12.9 mole %, 12.0 mole %, 13.1 mole %, 13.2 mole %, 13.3 mole %, 13.4 mole %, 13.5 mole %, 13.6 mole %, 13.7 mole %, 13.8 mole %, 13.9 mole %, or 14.0 mole %; from 5.9 mole % to: 6.0 mole %, 6.1 mole %, 6.2 mole %, 6.3 mole %, 6.4 mole %, 6.5 mole %, 6.6 mole %, 6.7 mole %, 6.8 mole %, 6.9 mole %, 7.0 mole %, 7.1 mole %, 7.2 mole %, 7.3 mole %, 7.4 mole %, 7.5 mole %, 7.6 mole %, 7.7 mole %, 7.8 mole %, 7.9 mole %, 8.0 mole %, 8.1 mole %, 8.2 mole %, 8.3 mole %, 8.4 mole %, 8.5 mole %, 8.6 mole %, 8.7 mole %, 8.8 mole %, 8.9 mole %, 9.0 mole %, 9.1 mole %, 9.2 mole %, 9.3 mole %, 9.4 mole %, 9.5 mole %, 9.6 mole %, 9.7 mole %, 9.8 mole %, 9.9 mole %, 10.0 mole %, 10.1 mole %, 10.2 mole %, 10.3 mole %, 10.4 mole %, 10.5 mole %, 10.6 mole %, 10.7 mole %, 10.8 mole %, 10.9 mole %, 11.0 mole %, 11.1 mole %, 11.2 mole %, 11.3 mole %, 11.4 mole %, 11.5 mole %, 11.6 mole %, 11.7 mole %, 11.8 mole %, 11.9 mole %, 12.0 mole %, 12.1 mole %, 12.2 mole %, 12.3 mole %, 12.4 mole %, 12.5 mole %, 12.6 mole %, 12.7 mole %, 12.8 mole %, 12.9 mole %, 12.0 mole %, 13.1 mole %, 13.2 mole %, 13.3 mole %, 13.4 mole %, 13.5 mole %, 13.6 mole %, 13.7 mole %, 13.8 mole %, 13.9 mole %, or 14.0 mole %; from 6.0 mole % to: 6.2 mole %, 6.3 mole %, 6.4 mole %, 6.5 mole %, 6.6 mole %, 6.7 mole %, 6.8 mole %, 6.9 mole %, 7.0 mole %, 7.1 mole %, 7.2 mole %, 7.3 mole %, 7.4 mole %, 7.5 mole %, 7.6 mole %, 7.7 mole %, 7.8 mole %, 7.9 mole %, 8.0 mole %, 8.1 mole %, 8.2 mole %, 8.3 mole %, 8.4 mole %, 8.5 mole %, 8.6 mole %, 8.7 mole %, 8.8 mole %, 8.9 mole %, 9.0 mole %, 9.1 mole %, 9.2 mole %, 9.3 mole %, 9.4 mole %, 9.5 mole %, 9.6 mole %, 9.7 mole %, 9.8 mole %, 9.9 mole %, 10.0 mole %, 10.1 mole %, 10.2 mole %, 10.3 mole %, 10.4 mole %, 10.5 mole %, 10.6 mole %, 10.7 mole %, 10.8 mole %, 10.9 mole %, 11.0 mole %, 11.1 mole %, 11.2 mole %, 11.3 mole %, 11.4 mole %, 11.5 mole %, 11.6 mole %, 11.7 mole %, 11.8 mole %, 11.9 mole %, 12.0 mole %, 12.1 mole %, 12.2 mole %, 12.3 mole %, 12.4 mole %, 12.5 mole %, 12.6 mole %, 12.7 mole %, 12.8 mole %, 12.9 mole %, 12.0 mole %, 13.1 mole %, 13.2 mole %, 13.3 mole %, 13.4 mole %, 13.5 mole %, 13.6 mole %, 13.7 mole %, 13.8 mole %, 13.9 mole %, or 14.0 mole %; from 6.1 mole % to: 6.2 mole %, 6.3 mole %, 6.4 mole %, 6.5 mole %, 6.6 mole %, 6.7 mole %, 6.8 mole %, 6.9 mole %, 7.0 mole %, 7.1 mole %, 7.2 mole %, 7.3 mole %, 7.4 mole %, 7.5 mole %, 7.6 mole %, 7.7 mole %, 7.8 mole %, 7.9 mole %, 8.0 mole %, 8.1 mole %, 8.2 mole %, 8.3 mole %, 8.4 mole %, 8.5 mole %, 8.6 mole %, 8.7 mole %, 8.8 mole %, 8.9 mole %, 9.0 mole %, 9.1 mole %, 9.2 mole %, 9.3 mole %, 9.4 mole %, 9.5 mole %, 9.6 mole %, 9.7 mole %, 9.8 mole %, 9.9 mole %, 10.0 mole %, 10.1 mole %, 10.2 mole %, 10.3 mole %, 10.4 mole %, 10.5 mole %, 10.6 mole %, 10.7 mole %, 10.8 mole %, 10.9 mole %, 11.0 mole %, 11.1 mole %, 11.2 mole %, 11.3 mole %, 11.4 mole %, 11.5 mole %, 11.6 mole %, 11.7 mole %, 11.8 mole %, 11.9 mole %, 12.0 mole %, 12.1 mole %, 12.2 mole %, 12.3 mole %, 12.4 mole %, 12.5 mole %, 12.6 mole %, 12.7 mole %, 12.8 mole %, 12.9 mole %, 12.0 mole %, 13.1 mole %, 13.2 mole %, 13.3 mole %, 13.4 mole %, 13.5 mole %, 13.6 mole %, 13.7 mole %, 13.8 mole %, 13.9 mole %, or 14.0 mole %; from 6.2 mole % to: 6.3 mole %, 6.4 mole %, 6.5 mole %, 6.6 mole %, 6.7 mole %, 6.8 mole %, 6.9 mole %, 7.0 mole %, 7.1 mole %, 7.2 mole %, 7.3 mole %, 7.4 mole %, 7.5 mole %, 7.6 mole %, 7.7 mole %, 7.8 mole %, 7.9 mole %, or 8.0 mole %; from 6.3 mole % to: 6.4 mole %, 6.5 mole %, 6.6 mole %, 6.7 mole %, 6.8 mole %, 6.9 mole %, 7.0 mole %, 7.1 mole %, 7.2 mole %, 7.3 mole %, 7.4 mole %, 7.5 mole %, 7.6 mole %, 7.7 mole %, 7.8 mole %, 7.9 mole %, 8.0 mole %, 8.1 mole %, 8.2 mole %, 8.3 mole %, 8.4 mole %, 8.5 mole %, 8.6 mole %, 8.7 mole %, 8.8 mole %, 8.9 mole %, 9.0 mole %, 9.1 mole %, 9.2 mole %, 9.3 mole %, 9.4 mole %, 9.5 mole %, 9.6 mole %, 9.7 mole %, 9.8 mole %, 9.9 mole %, 10.0 mole %, 10.1 mole %, 10.2 mole %, 10.3 mole %, 10.4 mole %, 10.5 mole %, 10.6 mole %, 10.7 mole %, 10.8 mole %, 10.9 mole %, 11.0 mole %, 11.1 mole %, 11.2 mole %, 11.3 mole %, 11.4 mole %, 11.5 mole %, 11.6 mole %, 11.7 mole %, 11.8 mole %, 11.9 mole %, 12.0 mole %, 12.1 mole %, 12.2 mole %, 12.3 mole %, 12.4 mole %, 12.5 mole %, 12.6 mole %, 12.7 mole %, 12.8 mole %, 12.9 mole %, 12.0 mole %, 13.1 mole %, 13.2 mole %, 13.3 mole %, 13.4 mole %, 13.5 mole %, 13.6 mole %, 13.7 mole %, 13.8 mole %, 13.9 mole %, or 14.0 mole %; from 6.4 mole % to: 6.5 mole %, 6.6 mole %, 6.7 mole %, 6.8 mole %, 6.9 mole %, 7.0 mole %, 7.1 mole %, 7.2 mole %, 7.3 mole %, 7.4 mole %, 7.5 mole %, 7.6 mole %, 7.7 mole %, 7.8 mole %, 7.9 mole %, or 8.0 mole %; from 6.5 mole % to: 6.6 mole %, 6.7 mole %, 6.8 mole %, 6.9 mole %, 7.0 mole %, 7.1 mole %, 7.2 mole %, 7.3 mole %, 7.4 mole %, 7.5 mole %, 7.6 mole %, 7.7 mole %, 7.8 mole %, 7.9 mole %, 8.0 mole %, 8.1 mole %, 8.2 mole %, 8.3 mole %, 8.4 mole %, 8.5 mole %, 8.6 mole %, 8.7 mole %, 8.8 mole %, 8.9 mole %, 9.0 mole %, 9.1 mole %, 9.2 mole %, 9.3 mole %, 9.4 mole %, 9.5 mole %, 9.6 mole %, 9.7 mole %, 9.8 mole %, 9.9 mole %, 10.0 mole %, 10.1 mole %, 10.2 mole %, 10.3 mole %, 10.4 mole %, 10.5 mole %, 10.6 mole %, 10.7 mole %, 10.8 mole %, 10.9 mole %, 11.0 mole %, 11.1 mole %, 11.2 mole %, 11.3 mole %, 11.4 mole %, 11.5 mole %, 11.6 mole %, 11.7 mole %, 11.8 mole %, 11.9 mole %, 12.0 mole %, 12.1 mole %, 12.2 mole %, 12.3 mole %, 12.4 mole %, 12.5 mole %, 12.6 mole %, 12.7 mole %, 12.8 mole %, 12.9 mole %, 12.0 mole %, 13.1 mole %, 13.2 mole %, 13.3 mole %, 13.4 mole %, 13.5 mole %, 13.6 mole %, 13.7 mole %, 13.8 mole %, 13.9 mole %, or 14.0 mole %; from 6.6 mole % to: 6.7 mole %, 6.8 mole %, 6.9 mole %, 7.0 mole %, 7.1 mole %, 7.2 mole %, 7.3 mole %, 7.4 mole %, 7.5 mole %, 7.6 mole %, 7.7 mole %, 7.8 mole %, 7.9 mole %, or 8.0 mole %; from 6.7 mole % to: 6.8 mole %, 6.9 mole %, 7.0 mole %, 7.1 mole %, 7.2 mole %, 7.3 mole %, 7.4 mole %, 7.5 mole %, 7.6 mole %, 7.7 mole %, 7.8 mole %, 7.9 mole %, 8.0 mole %, 8.1 mole %, 8.2 mole %, 8.3 mole %, 8.4 mole %, 8.5 mole %, 8.6 mole %, 8.7 mole %, 8.8 mole %, 8.9 mole %, 9.0 mole %, 9.1 mole %, 9.2 mole %, 9.3 mole %, 9.4 mole %, 9.5 mole %, 9.6 mole %, 9.7 mole %, 9.8 mole %, 9.9 mole %, 10.0 mole %, 10.1 mole %, 10.2 mole %, 10.3 mole %, 10.4 mole %, 10.5 mole %, 10.6 mole %, 10.7 mole %, 10.8 mole %, 10.9 mole %, 11.0 mole %, 11.1 mole %, 11.2 mole %, 11.3 mole %, 11.4 mole %, 11.5 mole %, 11.6 mole %, 11.7 mole %, 11.8 mole %, 11.9 mole %, 12.0 mole %, 12.1 mole %, 12.2 mole %, 12.3 mole %, 12.4 mole %, 12.5 mole %, 12.6 mole %, 12.7 mole %, 12.8 mole %, 12.9 mole %, 12.0 mole %, 13.1 mole %, 13.2 mole %, 13.3 mole %, 13.4 mole %, 13.5 mole %, 13.6 mole %, 13.7 mole %, 13.8 mole %, 13.9 mole %, or 14.0 mole %; from 6.8 mole % to: 6.9 mole %, 7.0 mole %, 7.1 mole %, 7.2 mole %, 7.3 mole %, 7.4 mole %, 7.5 mole %, 7.6 mole %, 7.7 mole %, 7.8 mole %, 7.9 mole %, or 8.0 mole %; from 6.9 mole % to: 7.0 mole %, 7.1 mole %, 7.2 mole %, 7.3 mole %, 7.4 mole %, 7.5 mole %, 7.6 mole %, 7.7 mole %, 7.8 mole %, 7.9 mole %, 8.0 mole %, 8.1 mole %, 8.2 mole %, 8.3 mole %, 8.4 mole %, 8.5 mole %, 8.6 mole %, 8.7 mole %, 8.8 mole %, 8.9 mole %, 9.0 mole %, 9.1 mole %, 9.2 mole %, 9.3 mole %, 9.4 mole %, 9.5 mole %, 9.6 mole %, 9.7 mole %, 9.8 mole %, 9.9 mole %, 10.0 mole %, 10.1 mole %, 10.2 mole %, 10.3 mole %, 10.4 mole %, 10.5 mole %, 10.6 mole %, 10.7 mole %, 10.8 mole %, 10.9 mole %, 11.0 mole %, 11.1 mole %, 11.2 mole %, 11.3 mole %, 11.4 mole %, 11.5 mole %, 11.6 mole %, 11.7 mole %, 11.8 mole %, 11.9 mole %, 12.0 mole %, 12.1 mole %, 12.2 mole %, 12.3 mole %, 12.4 mole %, 12.5 mole %, 12.6 mole %, 12.7 mole %, 12.8 mole %, 12.9 mole %, 12.0 mole %, 13.1 mole %, 13.2 mole %, 13.3 mole %, 13.4 mole %, 13.5 mole %, 13.6 mole %, 13.7 mole %, 13.8 mole %, 13.9 mole %, or 14.0 mole %; from 7.0 mole % to: 7.1 mole %, 7.2 mole %, 7.3 mole %, 7.4 mole %, 7.5 mole %, 7.6 mole %, 7.7 mole %, 7.8 mole %, 7.9 mole %, 8.0 mole %, 8.1 mole %, 8.2 mole %, 8.3 mole %, 8.4 mole %, 8.5 mole %, 8.6 mole %, 8.7 mole %, 8.8 mole %, 8.9 mole %, 9.0 mole %, 9.1 mole %, 9.2 mole %, 9.3 mole %, 9.4 mole %, 9.5 mole %, 9.6 mole %, 9.7 mole %, 9.8 mole %, 9.9 mole %, 10.0 mole %, 10.1 mole %, 10.2 mole %, 10.3 mole %, 10.4 mole %, 10.5 mole %, 10.6 mole %, 10.7 mole %, 10.8 mole %, 10.9 mole %, 11.0 mole %, 11.1 mole %, 11.2 mole %, 11.3 mole %, 11.4 mole %, 11.5 mole %, 11.6 mole %, 11.7 mole %, 11.8 mole %, 11.9 mole %, 12.0 mole %, 12.1 mole %, 12.2 mole %, 12.3 mole %, 12.4 mole %, 12.5 mole %, 12.6 mole %, 12.7 mole %, 12.8 mole %, 12.9 mole %, 12.0 mole %, 13.1 mole %, 13.2 mole %, 13.3 mole %, 13.4 mole %, 13.5 mole %, 13.6 mole %, 13.7 mole %, 13.8 mole %, 13.9 mole %, or 14.0 mole %; from 7.1 mole % to: 7.2 mole %, 7.3 mole %, 7.4 mole %, 7.5 mole %, 7.6 mole %, 7.7 mole %, 7.8 mole %, 7.9 mole %, 8.0 mole %, 8.1 mole %, 8.2 mole %, 8.3 mole %, 8.4 mole %, 8.5 mole %, 8.6 mole %, 8.7 mole %, 8.8 mole %, 8.9 mole %, 9.0 mole %, 9.1 mole %, 9.2 mole %, 9.3 mole %, 9.4 mole %, 9.5 mole %, 9.6 mole %, 9.7 mole %, 9.8 mole %, 9.9 mole %, 10.0 mole %, 10.1 mole %, 10.2 mole %, 10.3 mole %, 10.4 mole %, 10.5 mole %, 10.6 mole %, 10.7 mole %, 10.8 mole %, 10.9 mole %, 11.0 mole %, 11.1 mole %, 11.2 mole %, 11.3 mole %, 11.4 mole %, 11.5 mole %, 11.6 mole %, 11.7 mole %, 11.8 mole %, 11.9 mole %, 12.0 mole %, 12.1 mole %, 12.2 mole %, 12.3 mole %, 12.4 mole %, 12.5 mole %, 12.6 mole %, 12.7 mole %, 12.8 mole %, 12.9 mole %, 12.0 mole %, 13.1 mole %, 13.2 mole %, 13.3 mole %, 13.4 mole %, 13.5 mole %, 13.6 mole %, 13.7 mole %, 13.8 mole %, 13.9 mole %, or 14.0 mole %; from 7.2 mole % to: 7.3 mole %, 7.4 mole %, 7.5 mole %, 7.6 mole %, 7.7 mole %, 7.8 mole %, 7.9 mole %, 8.0 mole %, 8.1 mole %, 8.2 mole %, 8.3 mole %, 8.4 mole %, 8.5 mole %, 8.6 mole %, 8.7 mole %, 8.8 mole %, 8.9 mole %, 9.0 mole %, 9.1 mole %, 9.2 mole %, 9.3 mole %, 9.4 mole %, 9.5 mole %, 9.6 mole %, 9.7 mole %, 9.8 mole %, 9.9 mole %, 10.0 mole %, 10.1 mole %, 10.2 mole %, 10.3 mole %, 10.4 mole %, 10.5 mole %, 10.6 mole %, 10.7 mole %, 10.8 mole %, 10.9 mole %, 11.0 mole %, 11.1 mole %, 11.2 mole %, 11.3 mole %, 11.4 mole %, 11.5 mole %, 11.6 mole %, 11.7 mole %, 11.8 mole %, 11.9 mole %, 12.0 mole %, 12.1 mole %, 12.2 mole %, 12.3 mole %, 12.4 mole %, 12.5 mole %, 12.6 mole %, 12.7 mole %, 12.8 mole %, 12.9 mole %, 12.0 mole %, 13.1 mole %, 13.2 mole %, 13.3 mole %, 13.4 mole %, 13.5 mole %, 13.6 mole %, 13.7 mole %, 13.8 mole %, 13.9 mole %, or 14.0 mole %; from 7.3 mole % to: 7.4 mole %, 7.5 mole %, 7.6 mole %, 7.7 mole %, 7.8 mole %, 7.9 mole %, 8.0 mole %, 8.1 mole %, 8.2 mole %, 8.3 mole %, 8.4 mole %, 8.5 mole %, 8.6 mole %, 8.7 mole %, 8.8 mole %, 8.9 mole %, 9.0 mole %, 9.1 mole %, 9.2 mole %, 9.3 mole %, 9.4 mole %, 9.5 mole %, 9.6 mole %, 9.7 mole %, 9.8 mole %, 9.9 mole %, 10.0 mole %, 10.1 mole %, 10.2 mole %, 10.3 mole %, 10.4 mole %, 10.5 mole %, 10.6 mole %, 10.7 mole %, 10.8 mole %, 10.9 mole %, 11.0 mole %, 11.1 mole %, 11.2 mole %, 11.3 mole %, 11.4 mole %, 11.5 mole %, 11.6 mole %, 11.7 mole %, 11.8 mole %, 11.9 mole %, 12.0 mole %, 12.1 mole %, 12.2 mole %, 12.3 mole %, 12.4 mole %, 12.5 mole %, 12.6 mole %, 12.7 mole %, 12.8 mole %, 12.9 mole %, 12.0 mole %, 13.1 mole %, 13.2 mole %, 13.3 mole %, 13.4 mole %, 13.5 mole %, 13.6 mole %, 13.7 mole %, 13.8 mole %, 13.9 mole %, or 14.0 mole %; from 7.4 mole % to: 7.5 mole %, 7.6 mole %, 7.7 mole %, 7.8 mole %, 7.9 mole %, 8.0 mole %, 8.1 mole %, 8.2 mole %, 8.3 mole %, 8.4 mole %, 8.5 mole %, 8.6 mole %, 8.7 mole %, 8.8 mole %, 8.9 mole %, 9.0 mole %, 9.1 mole %, 9.2 mole %, 9.3 mole %, 9.4 mole %, 9.5 mole %, 9.6 mole %, 9.7 mole %, 9.8 mole %, 9.9 mole %, 10.0 mole %, 10.1 mole %, 10.2 mole %, 10.3 mole %, 10.4 mole %, 10.5 mole %, 10.6 mole %, 10.7 mole %, 10.8 mole %, 10.9 mole %, 11.0 mole %, 11.1 mole %, 11.2 mole %, 11.3 mole %, 11.4 mole %, 11.5 mole %, 11.6 mole %, 11.7 mole %, 11.8 mole %, 11.9 mole %, 12.0 mole %, 12.1 mole %, 12.2 mole %, 12.3 mole %, 12.4 mole %, 12.5 mole %, 12.6 mole %, 12.7 mole %, 12.8 mole %, 12.9 mole %, 12.0 mole %, 13.1 mole %, 13.2 mole %, 13.3 mole %, 13.4 mole %, 13.5 mole %, 13.6 mole %, 13.7 mole %, 13.8 mole %, 13.9 mole %, or 14.0 mole %; from 7.5 mole % to: 7.6 mole %, 7.7 mole %, 7.8 mole %, 7.9 mole %, 8.0 mole %, 8.1 mole %, 8.2 mole %, 8.3 mole %, 8.4 mole %, 8.5 mole %, 8.6 mole %, 8.7 mole %, 8.8 mole %, 8.9 mole %, 9.0 mole %, 9.1 mole %, 9.2 mole %, 9.3 mole %, 9.4 mole %, 9.5 mole %, 9.6 mole %, 9.7 mole %, 9.8 mole %, 9.9 mole %, 10.0 mole %, 10.1 mole %, 10.2 mole %, 10.3 mole %, 10.4 mole %, 10.5 mole %, 10.6 mole %, 10.7 mole %, 10.8 mole %, 10.9 mole %, 11.0 mole %, 11.1 mole %, 11.2 mole %, 11.3 mole %, 11.4 mole %, 11.5 mole %, 11.6 mole %, 11.7 mole %, 11.8 mole %, 11.9 mole %, 12.0 mole %, 12.1 mole %, 12.2 mole %, 12.3 mole %, 12.4 mole %, 12.5 mole %, 12.6 mole %, 12.7 mole %, 12.8 mole %, 12.9 mole %, 12.0 mole %, 13.1 mole %, 13.2 mole %, 13.3 mole %, 13.4 mole %, 13.5 mole %, 13.6 mole %, 13.7 mole %, 13.8 mole %, 13.9 mole %, or 14.0 mole %; from 7.6 mole % to: 7.7 mole %, 7.8 mole %, 7.9 mole %, 8.0 mole %, 8.1 mole %, 8.2 mole %, 8.3 mole %, 8.4 mole %, 8.5 mole %, 8.6 mole %, 8.7 mole %, 8.8 mole %, 8.9 mole %, 9.0 mole %, 9.1 mole %, 9.2 mole %, 9.3 mole %, 9.4 mole %, 9.5 mole %, 9.6 mole %, 9.7 mole %, 9.8 mole %, 9.9 mole %, 10.0 mole %, 10.1 mole %, 10.2 mole %, 10.3 mole %, 10.4 mole %, 10.5 mole %, 10.6 mole %, 10.7 mole %, 10.8 mole %, 10.9 mole %, 11.0 mole %, 11.1 mole %, 11.2 mole %, 11.3 mole %, 11.4 mole %, 11.5 mole %, 11.6 mole %, 11.7 mole %, 11.8 mole %, 11.9 mole %, 12.0 mole %, 12.1 mole %, 12.2 mole %, 12.3 mole %, 12.4 mole %, 12.5 mole %, 12.6 mole %, 12.7 mole %, 12.8 mole %, 12.9 mole %, 12.0 mole %, 13.1 mole %, 13.2 mole %, 13.3 mole %, 13.4 mole %, 13.5 mole %, 13.6 mole %, 13.7 mole %, 13.8 mole %, 13.9 mole %, or 14.0 mole %; from 7.7 mole % to: 7.8 mole %, 7.9 mole %, 8.0 mole %, 8.1 mole %, 8.2 mole %, 8.3 mole %, 8.4 mole %, 8.5 mole %, 8.6 mole %, 8.7 mole %, 8.8 mole %, 8.9 mole %, 9.0 mole %, 9.1 mole %, 9.2 mole %, 9.3 mole %, 9.4 mole %, 9.5 mole %, 9.6 mole %, 9.7 mole %, 9.8 mole %, 9.9 mole %, 10.0 mole %, 10.1 mole %, 10.2 mole %, 10.3 mole %, 10.4 mole %, 10.5 mole %, 10.6 mole %, 10.7 mole %, 10.8 mole %, 10.9 mole %, 11.0 mole %, 11.1 mole %, 11.2 mole %, 11.3 mole %, 11.4 mole %, 11.5 mole %, 11.6 mole %, 11.7 mole %, 11.8 mole %, 11.9 mole %, 12.0 mole %, 12.1 mole %, 12.2 mole %, 12.3 mole %, 12.4 mole %, 12.5 mole %, 12.6 mole %, 12.7 mole %, 12.8 mole %, 12.9 mole %, 12.0 mole %, 13.1 mole %, 13.2 mole %, 13.3 mole %, 13.4 mole %, 13.5 mole %, 13.6 mole %, 13.7 mole %, 13.8 mole %, 13.9 mole %, or 14.0 mole %; from 7.8 mole % to: 7.9 mole %, 8.0 mole %, 8.1 mole %, 8.2 mole %, 8.3 mole %, 8.4 mole %, 8.5 mole %, 8.6 mole %, 8.7 mole %, 8.8 mole %, 8.9 mole %, 9.0 mole %, 9.1 mole %, 9.2 mole %, 9.3 mole %, 9.4 mole %, 9.5 mole %, 9.6 mole %, 9.7 mole %, 9.8 mole %, 9.9 mole %, 10.0 mole %, 10.1 mole %, 10.2 mole %, 10.3 mole %, 10.4 mole %, 10.5 mole %, 10.6 mole %, 10.7 mole %, 10.8 mole %, 10.9 mole %, 11.0 mole %, 11.1 mole %, 11.2 mole %, 11.3 mole %, 11.4 mole %, 11.5 mole %, 11.6 mole %, 11.7 mole %, 11.8 mole %, 11.9 mole %, 12.0 mole %, 12.1 mole %, 12.2 mole %, 12.3 mole %, 12.4 mole %, 12.5 mole %, 12.6 mole %, 12.7 mole %, 12.8 mole %, 12.9 mole %, 12.0 mole %, 13.1 mole %, 13.2 mole %, 13.3 mole %, 13.4 mole %, 13.5 mole %, 13.6 mole %, 13.7 mole %, 13.8 mole %, 13.9 mole %, or 14.0 mole %; from 7.9 mole % to: 8.0 mole %, 8.1 mole %, 8.2 mole %, 8.3 mole %, 8.4 mole %, 8.5 mole %, 8.6 mole %, 8.7 mole %, 8.8 mole %, 8.9 mole %, 9.0 mole %, 9.1 mole %, 9.2 mole %, 9.3 mole %, 9.4 mole %, 9.5 mole %, 9.6 mole %, 9.7 mole %, 9.8 mole %, 9.9 mole %, 10.0 mole %, 10.1 mole %, 10.2 mole %, 10.3 mole %, 10.4 mole %, 10.5 mole %, 10.6 mole %, 10.7 mole %, 10.8 mole %, 10.9 mole %, 11.0 mole %, 11.1 mole %, 11.2 mole %, 11.3 mole %, 11.4 mole %, 11.5 mole %, 11.6 mole %, 11.7 mole %, 11.8 mole %, 11.9 mole %, 12.0 mole %, 12.1 mole %, 12.2 mole %, 12.3 mole %, 12.4 mole %, 12.5 mole %, 12.6 mole %, 12.7 mole %, 12.8 mole %, 12.9 mole %, 12.0 mole %, 13.1 mole %, 13.2 mole %, 13.3 mole %, 13.4 mole %, 13.5 mole %, 13.6 mole %, 13.7 mole %, 13.8 mole %, 13.9 mole %, or 14.0 mole %; from 8.0 mole % to: 8.1 mole %, 8.2 mole %, 8.3 mole %, 8.4 mole %, 8.5 mole %, 8.6 mole %, 8.7 mole %, 8.8 mole %, 8.9 mole %, 9.0 mole %, 9.1 mole %, 9.2 mole %, 9.3 mole %, 9.4 mole %, 9.5 mole %, 9.6 mole %, 9.7 mole %, 9.8 mole %, 9.9 mole %, 10.0 mole %, 10.1 mole %, 10.2 mole %, 10.3 mole %, 10.4 mole %, 10.5 mole %, 10.6 mole %, 10.7 mole %, 10.8 mole %, 10.9 mole %, 11.0 mole %, 11.1 mole %, 11.2 mole %, 11.3 mole %, 11.4 mole %, 11.5 mole %, 11.6 mole %, 11.7 mole %, 11.8 mole %, 11.9 mole %, 12.0 mole %, 12.1 mole %, 12.2 mole %, 12.3 mole %, 12.4 mole %, 12.5 mole %, 12.6 mole %, 12.7 mole %, 12.8 mole %, 12.9 mole %, 12.0 mole %, 13.1 mole %, 13.2 mole %, 13.3 mole %, 13.4 mole %, 13.5 mole %, 13.6 mole %, 13.7 mole %, 13.8 mole %, 13.9 mole %, or 14.0 mole %; from 8.1 mole % to: 8.2 mole %, 8.3 mole %, 8.4 mole %, 8.5 mole %, 8.6 mole %, 8.7 mole %, 8.8 mole %, 8.9 mole %, 9.0 mole %, 9.1 mole %, 9.2 mole %, 9.3 mole %, 9.4 mole %, 9.5 mole %, 9.6 mole %, 9.7 mole %, 9.8 mole %, 9.9 mole %, 10.0 mole %, 10.1 mole %, 10.2 mole %, 10.3 mole %, 10.4 mole %, 10.5 mole %, 10.6 mole %, 10.7 mole %, 10.8 mole %, 10.9 mole %, 11.0 mole %, 11.1 mole %, 11.2 mole %, 11.3 mole %, 11.4 mole %, 11.5 mole %, 11.6 mole %, 11.7 mole %, 11.8 mole %, 11.9 mole %, 12.0 mole %, 12.1 mole %, 12.2 mole %, 12.3 mole %, 12.4 mole %, 12.5 mole %, 12.6 mole %, 12.7 mole %, 12.8 mole %, 12.9 mole %, 12.0 mole %, 13.1 mole %, 13.2 mole %, 13.3 mole %, 13.4 mole %, 13.5 mole %, 13.6 mole %, 13.7 mole %, 13.8 mole %, 13.9 mole %, or 14.0 mole %; from 8.2 mole % to: 8.3 mole %, 8.4 mole %, 8.5 mole %, 8.6 mole %, 8.7 mole %, 8.8 mole %, 8.9 mole %, 9.0 mole %, 9.1 mole %, 9.2 mole %, 9.3 mole %, 9.4 mole %, 9.5 mole %, 9.6 mole %, 9.7 mole %, 9.8 mole %, 9.9 mole %, 10.0 mole %, 10.1 mole %, 10.2 mole %, 10.3 mole %, 10.4 mole %, 10.5 mole %, 10.6 mole %, 10.7 mole %, 10.8 mole %, 10.9 mole %, 11.0 mole %, 11.1 mole %, 11.2 mole %, 11.3 mole %, 11.4 mole %, 11.5 mole %, 11.6 mole %, 11.7 mole %, 11.8 mole %, 11.9 mole %, 12.0 mole %, 12.1 mole %, 12.2 mole %, 12.3 mole %, 12.4 mole %, 12.5 mole %, 12.6 mole %, 12.7 mole %, 12.8 mole %, 12.9 mole %, 12.0 mole %, 13.1 mole %, 13.2 mole %, 13.3 mole %, 13.4 mole %, 13.5 mole %, 13.6 mole %, 13.7 mole %, 13.8 mole %, 13.9 mole %, or 14.0 mole %; from 8.3 mole % to: 8.4 mole %, 8.5 mole %, 8.6 mole %, 8.7 mole %, 8.8 mole %, 8.9 mole %, 9.0 mole %, 9.1 mole %, 9.2 mole %, 9.3 mole %, 9.4 mole %, 9.5 mole %, 9.6 mole %, 9.7 mole %, 9.8 mole %, 9.9 mole %, 10.0 mole %, 10.1 mole %, 10.2 mole %, 10.3 mole %, 10.4 mole %, 10.5 mole %, 10.6 mole %, 10.7 mole %, 10.8 mole %, 10.9 mole %, 11.0 mole %, 11.1 mole %, 11.2 mole %, 11.3 mole %, 11.4 mole %, 11.5 mole %, 11.6 mole %, 11.7 mole %, 11.8 mole %, 11.9 mole %, 12.0 mole %, 12.1 mole %, 12.2 mole %, 12.3 mole %, 12.4 mole %, 12.5 mole %, 12.6 mole %, 12.7 mole %, 12.8 mole %, 12.9 mole %, 12.0 mole %, 13.1 mole %, 13.2 mole %, 13.3 mole %, 13.4 mole %, 13.5 mole %, 13.6 mole %, 13.7 mole %, 13.8 mole %, 13.9 mole %, or 14.0 mole %; from 8.4 mole % to: 8.5 mole %, 8.6 mole %, 8.7 mole %, 8.8 mole %, 8.9 mole %, 9.0 mole %, 9.1 mole %, 9.2 mole %, 9.3 mole %, 9.4 mole %, 9.5 mole %, 9.6 mole %, 9.7 mole %, 9.8 mole %, 9.9 mole %, 10.0 mole %, 10.1 mole %, 10.2 mole %, 10.3 mole %, 10.4 mole %, 10.5 mole %, 10.6 mole %, 10.7 mole %, 10.8 mole %, 10.9 mole %, 11.0 mole %, 11.1 mole %, 11.2 mole %, 11.3 mole %, 11.4 mole %, 11.5 mole %, 11.6 mole %, 11.7 mole %, 11.8 mole %, 11.9 mole %, 12.0 mole %, 12.1 mole %, 12.2 mole %, 12.3 mole %, 12.4 mole %, 12.5 mole %, 12.6 mole %, 12.7 mole %, 12.8 mole %, 12.9 mole %, 12.0 mole %, 13.1 mole %, 13.2 mole %, 13.3 mole %, 13.4 mole %, 13.5 mole %, 13.6 mole %, 13.7 mole %, 13.8 mole %, 13.9 mole %, or 14.0 mole %; from 8.5 mole % to: 8.6 mole %, 8.7 mole %, 8.8 mole %, 8.9 mole %, 9.0 mole %, 9.1 mole %, 9.2 mole %, 9.3 mole %, 9.4 mole %, 9.5 mole %, 9.6 mole %, 9.7 mole %, 9.8 mole %, 9.9 mole %, 10.0 mole %, 10.1 mole %, 10.2 mole %, 10.3 mole %, 10.4 mole %, 10.5 mole %, 10.6 mole %, 10.7 mole %, 10.8 mole %, 10.9 mole %, 11.0 mole %, 11.1 mole %, 11.2 mole %, 11.3 mole %, 11.4 mole %, 11.5 mole %, 11.6 mole %, 11.7 mole %, 11.8 mole %, 11.9 mole %, 12.0 mole %, 12.1 mole %, 12.2 mole %, 12.3 mole %, 12.4 mole %, 12.5 mole %, 12.6 mole %, 12.7 mole %, 12.8 mole %, 12.9 mole %, 12.0 mole %, 13.1 mole %, 13.2 mole %, 13.3 mole %, 13.4 mole %, 13.5 mole %, 13.6 mole %, 13.7 mole %, 13.8 mole %, 13.9 mole %, or 14.0 mole %; from 8.6 mole % to: 8.7 mole %, 8.8 mole %, 8.9 mole %, 9.0 mole %, 9.1 mole %, 9.2 mole %, 9.3 mole %, 9.4 mole %, 9.5 mole %, 9.6 mole %, 9.7 mole %, 9.8 mole %, 9.9 mole %, 10.0 mole %, 10.1 mole %, 10.2 mole %, 10.3 mole %, 10.4 mole %, 10.5 mole %, 10.6 mole %, 10.7 mole %, 10.8 mole %, 10.9 mole %, 11.0 mole %, 11.1 mole %, 11.2 mole %, 11.3 mole %, 11.4 mole %, 11.5 mole %, 11.6 mole %, 11.7 mole %, 11.8 mole %, 11.9 mole %, 12.0 mole %, 12.1 mole %, 12.2 mole %, 12.3 mole %, 12.4 mole %, 12.5 mole %, 12.6 mole %, 12.7 mole %, 12.8 mole %, 12.9 mole %, 12.0 mole %, 13.1 mole %, 13.2 mole %, 13.3 mole %, 13.4 mole %, 13.5 mole %, 13.6 mole %, 13.7 mole %, 13.8 mole %, 13.9 mole %, or 14.0 mole %; from 8.7 mole % to: 8.8 mole %, 8.9 mole %, 9.0 mole %, 9.1 mole %, 9.2 mole %, 9.3 mole %, 9.4 mole %, 9.5 mole %, 9.6 mole %, 9.7 mole %, 9.8 mole %, 9.9 mole %, 10.0 mole %, 10.1 mole %, 10.2 mole %, 10.3 mole %, 10.4 mole %, 10.5 mole %, 10.6 mole %, 10.7 mole %, 10.8 mole %, 10.9 mole %, 11.0 mole %, 11.1 mole %, 11.2 mole %, 11.3 mole %, 11.4 mole %, 11.5 mole %, 11.6 mole %, 11.7 mole %, 11.8 mole %, 11.9 mole %, 12.0 mole %, 12.1 mole %, 12.2 mole %, 12.3 mole %, 12.4 mole %, 12.5 mole %, 12.6 mole %, 12.7 mole %, 12.8 mole %, 12.9 mole %, 12.0 mole %, 13.1 mole %, 13.2 mole %, 13.3 mole %, 13.4 mole %, 13.5 mole %, 13.6 mole %, 13.7 mole %, 13.8 mole %, 13.9 mole %, or 14.0 mole %; from 8.8 mole % to: 8.9 mole %, 9.0 mole %, 9.1 mole %, 9.2 mole %, 9.3 mole %, 9.4 mole %, 9.5 mole %, 9.6 mole %, 9.7 mole %, 9.8 mole %, 9.9 mole %, 10.0 mole %, 10.1 mole %, 10.2 mole %, 10.3 mole %, 10.4 mole %, 10.5 mole %, 10.6 mole %, 10.7 mole %, 10.8 mole %, 10.9 mole %, 11.0 mole %, 11.1 mole %, 11.2 mole %, 11.3 mole %, 11.4 mole %, 11.5 mole %, 11.6 mole %, 11.7 mole %, 11.8 mole %, 11.9 mole %, 12.0 mole %, 12.1 mole %, 12.2 mole %, 12.3 mole %, 12.4 mole %, 12.5 mole %, 12.6 mole %, 12.7 mole %, 12.8 mole %, 12.9 mole %, 12.0 mole %, 13.1 mole %, 13.2 mole %, 13.3 mole %, 13.4 mole %, 13.5 mole %, 13.6 mole %, 13.7 mole %, 13.8 mole %, 13.9 mole %, or 14.0 mole %; from 8.9 mole % to: 9.0 mole %, 9.1 mole %, 9.2 mole %, 9.3 mole %, 9.4 mole %, 9.5 mole %, 9.6 mole %, 9.7 mole %, 9.8 mole %, 9.9 mole %, 10.0 mole %, 10.1 mole %, 10.2 mole %, 10.3 mole %, 10.4 mole %, 10.5 mole %, 10.6 mole %, 10.7 mole %, 10.8 mole %, 10.9 mole %, 11.0 mole %, 11.1 mole %, 11.2 mole %, 11.3 mole %, 11.4 mole %, 11.5 mole %, 11.6 mole %, 11.7 mole %, 11.8 mole %, 11.9 mole %, 12.0 mole %, 12.1 mole %, 12.2 mole %, 12.3 mole %, 12.4 mole %, 12.5 mole %, 12.6 mole %, 12.7 mole %, 12.8 mole %, 12.9 mole %, 12.0 mole %, 13.1 mole %, 13.2 mole %, 13.3 mole %, 13.4 mole %, 13.5 mole %, 13.6 mole %, 13.7 mole %, 13.8 mole %, 13.9 mole %, or 14.0 mole %; from 9.0 mole % to: 9.1 mole %, 9.2 mole %, 9.3 mole %, 9.4 mole %, 9.5 mole %, 9.6 mole %, 9.7 mole %, 9.8 mole %, 9.9 mole %, 10.0 mole %, 10.1 mole %, 10.2 mole %, 10.3 mole %, 10.4 mole %, 10.5 mole %, 10.6 mole %, 10.7 mole %, 10.8 mole %, 10.9 mole %, 11.0 mole %, 11.1 mole %, 11.2 mole %, 11.3 mole %, 11.4 mole %, 11.5 mole %, 11.6 mole %, 11.7 mole %, 11.8 mole %, 11.9 mole %, 12.0 mole %, 12.1 mole %, 12.2 mole %, 12.3 mole %, 12.4 mole %, 12.5 mole %, 12.6 mole %, 12.7 mole %, 12.8 mole %, 12.9 mole %, 12.0 mole %, 13.1 mole %, 13.2 mole %, 13.3 mole %, 13.4 mole %, 13.5 mole %, 13.6 mole %, 13.7 mole %, 13.8 mole %, 13.9 mole %, or 14.0 mole %; from 9.1 mole % to: 9.2 mole %, 9.3 mole %, 9.4 mole %, 9.5 mole %, 9.6 mole %, 9.7 mole %, 9.8 mole %, 9.9 mole %, 10.0 mole %, 10.1 mole %, 10.2 mole %, 10.3 mole %, 10.4 mole %, 10.5 mole %, 10.6 mole %, 10.7 mole %, 10.8 mole %, 10.9 mole %, 11.0 mole %, 11.1 mole %, 11.2 mole %, 11.3 mole %, 11.4 mole %, 11.5 mole %, 11.6 mole %, 11.7 mole %, 11.8 mole %, 11.9 mole %, 12.0 mole %, 12.1 mole %, 12.2 mole %, 12.3 mole %, 12.4 mole %, 12.5 mole %, 12.6 mole %, 12.7 mole %, 12.8 mole %, 12.9 mole %, 12.0 mole %, 13.1 mole %, 13.2 mole %, 13.3 mole %, 13.4 mole %, 13.5 mole %, 13.6 mole %, 13.7 mole %, 13.8 mole %, 13.9 mole %, or 14.0 mole %; from 9.2 mole % to: 9.3 mole %, 9.4 mole %, 9.5 mole %, 9.6 mole %, 9.7 mole %, 9.8 mole %, 9.9 mole %, 10.0 mole %, 10.1 mole %, 10.2 mole %, 10.3 mole %, 10.4 mole %, 10.5 mole %, 10.6 mole %, 10.7 mole %, 10.8 mole %, 10.9 mole %, 11.0 mole %, 11.1 mole %, 11.2 mole %, 11.3 mole %, 11.4 mole %, 11.5 mole %, 11.6 mole %, 11.7 mole %, 11.8 mole %, 11.9 mole %, 12.0 mole %, 12.1 mole %, 12.2 mole %, 12.3 mole %, 12.4 mole %, 12.5 mole %, 12.6 mole %, 12.7 mole %, 12.8 mole %, 12.9 mole %, 12.0 mole %, 13.1 mole %, 13.2 mole %, 13.3 mole %, 13.4 mole %, 13.5 mole %, 13.6 mole %, 13.7 mole %, 13.8 mole %, 13.9 mole %, or 14.0 mole %; from 9.3 mole % to: 9.4 mole %, 9.5 mole %, 9.6 mole %, 9.7 mole %, 9.8 mole %, 9.9 mole %, 10.0 mole %, 10.1 mole %, 10.2 mole %, 10.3 mole %, 10.4 mole %, 10.5 mole %, 10.6 mole %, 10.7 mole %, 10.8 mole %, 10.9 mole %, 11.0 mole %, 11.1 mole %, 11.2 mole %, 11.3 mole %, 11.4 mole %, 11.5 mole %, 11.6 mole %, 11.7 mole %, 11.8 mole %, 11.9 mole %, 12.0 mole %, 12.1 mole %, 12.2 mole %, 12.3 mole %, 12.4 mole %, 12.5 mole %, 12.6 mole %, 12.7 mole %, 12.8 mole %, 12.9 mole %, 12.0 mole %, 13.1 mole %, 13.2 mole %, 13.3 mole %, 13.4 mole %, 13.5 mole %, 13.6 mole %, 13.7 mole %, 13.8 mole %, 13.9 mole %, or 14.0 mole %; from 9.4 mole % to: 9.5 mole %, 9.6 mole %, 9.7 mole %, 9.8 mole %, 9.9 mole %, 10.0 mole %, 10.1 mole %, 10.2 mole %, 10.3 mole %, 10.4 mole %, 10.5 mole %, 10.6 mole %, 10.7 mole %, 10.8 mole %, 10.9 mole %, 11.0 mole %, 11.1 mole %, 11.2 mole %, 11.3 mole %, 11.4 mole %, 11.5 mole %, 11.6 mole %, 11.7 mole %, 11.8 mole %, 11.9 mole %, 12.0 mole %, 12.1 mole %, 12.2 mole %, 12.3 mole %, 12.4 mole %, 12.5 mole %, 12.6 mole %, 12.7 mole %, 12.8 mole %, 12.9 mole %, 12.0 mole %, 13.1 mole %, 13.2 mole %, 13.3 mole %, 13.4 mole %, 13.5 mole %, 13.6 mole %, 13.7 mole %, 13.8 mole %, 13.9 mole %, or 14.0 mole %; from 9.5 mole % to: 9.6 mole %, 9.7 mole %, 9.8 mole %, 9.9 mole %, 10.0 mole %, 10.1 mole %, 10.2 mole %, 10.3 mole %, 10.4 mole %, 10.5 mole %, 10.6 mole %, 10.7 mole %, 10.8 mole %, 10.9 mole %, 11.0 mole %, 11.1 mole %, 11.2 mole %, 11.3 mole %, 11.4 mole %, 11.5 mole %, 11.6 mole %, 11.7 mole %, 11.8 mole %, 11.9 mole %, 12.0 mole %, 12.1 mole %, 12.2 mole %, 12.3 mole %, 12.4 mole %, 12.5 mole %, 12.6 mole %, 12.7 mole %, 12.8 mole %, 12.9 mole %, 12.0 mole %, 13.1 mole %, 13.2 mole %, 13.3 mole %, 13.4 mole %, 13.5 mole %, 13.6 mole %, 13.7 mole %, 13.8 mole %, 13.9 mole %, or 14.0 mole %; from 9.6 mole % to: 9.7 mole %, 9.8 mole %, 9.9 mole %, 10.0 mole %, 10.1 mole %, 10.2 mole %, 10.3 mole %, 10.4 mole %, 10.5 mole %, 10.6 mole %, 10.7 mole %, 10.8 mole %, 10.9 mole %, 11.0 mole %, 11.1 mole %, 11.2 mole %, 11.3 mole %, 11.4 mole %, 11.5 mole %, 11.6 mole %, 11.7 mole %, 11.8 mole %, 11.9 mole %, 12.0 mole %, 12.1 mole %, 12.2 mole %, 12.3 mole %, 12.4 mole %, 12.5 mole %, 12.6 mole %, 12.7 mole %, 12.8 mole %, 12.9 mole %, 12.0 mole %, 13.1 mole %, 13.2 mole %, 13.3 mole %, 13.4 mole %, 13.5 mole %, 13.6 mole %, 13.7 mole %, 13.8 mole %, 13.9 mole %, or 14.0 mole %; from 9.7 mole % to: 9.8 mole %, 9.9 mole %, 10.0 mole %, 10.1 mole %, 10.2 mole %, 10.3 mole %, 10.4 mole %, 10.5 mole %, 10.6 mole %, 10.7 mole %, 10.8 mole %, 10.9 mole %, 11.0 mole %, 11.1 mole %, 11.2 mole %, 11.3 mole %, 11.4 mole %, 11.5 mole %, 11.6 mole %, 11.7 mole %, 11.8 mole %, 11.9 mole %, 12.0 mole %, 12.1 mole %, 12.2 mole %, 12.3 mole %, 12.4 mole %, 12.5 mole %, 12.6 mole %, 12.7 mole %, 12.8 mole %, 12.9 mole %, 12.0 mole %, 13.1 mole %, 13.2 mole %, 13.3 mole %, 13.4 mole %, 13.5 mole %, 13.6 mole %, 13.7 mole %, 13.8 mole %, 13.9 mole %, or 14.0 mole %; from 9.8 mole % to: 9.9 mole %, 10.0 mole %, 10.1 mole %, 10.2 mole %, 10.3 mole %, 10.4 mole %, 10.5 mole %, 10.6 mole %, 10.7 mole %, 10.8 mole %, 10.9 mole %, 11.0 mole %, 11.1 mole %, 11.2 mole %, 11.3 mole %, 11.4 mole %, 11.5 mole %, 11.6 mole %, 11.7 mole %, 11.8 mole %, 11.9 mole %, 12.0 mole %, 12.1 mole %, 12.2 mole %, 12.3 mole %, 12.4 mole %, 12.5 mole %, 12.6 mole %, 12.7 mole %, 12.8 mole %, 12.9 mole %, 12.0 mole %, 13.1 mole %, 13.2 mole %, 13.3 mole %, 13.4 mole %, 13.5 mole %, 13.6 mole %, 13.7 mole %, 13.8 mole %, 13.9 mole %, or 14.0 mole %; from 9.9 mole % to: 10.0 mole %, 10.1 mole %, 10.2 mole %, 10.3 mole %, 10.4 mole %, 10.5 mole %, 10.6 mole %, 10.7 mole %, 10.8 mole %, 10.9 mole %, 11.0 mole %, 11.1 mole %, 11.2 mole %, 11.3 mole %, 11.4 mole %, 11.5 mole %, 11.6 mole %, 11.7 mole %, 11.8 mole %, 11.9 mole %, 12.0 mole %, 12.1 mole %, 12.2 mole %, 12.3 mole %, 12.4 mole %, 12.5 mole %, 12.6 mole %, 12.7 mole %, 12.8 mole %, 12.9 mole %, 12.0 mole %, 13.1 mole %, 13.2 mole %, 13.3 mole %, 13.4 mole %, 13.5 mole %, 13.6 mole %, 13.7 mole %, 13.8 mole %, 13.9 mole %, or 14.0 mole %; from 10.0 mole % to: 10.1 mole %, 10.2 mole %, 10.3 mole %, 10.4 mole %, 10.5 mole %, 10.6 mole %, 10.7 mole %, 10.8 mole %, 10.9 mole %, 11.0 mole %, 11.1 mole %, 11.2 mole %, 11.3 mole %, 11.4 mole %, 11.5 mole %, 11.6 mole %, 11.7 mole %, 11.8 mole %, 11.9 mole %, 12.0 mole %, 12.1 mole %, 12.2 mole %, 12.3 mole %, 12.4 mole %, 12.5 mole %, 12.6 mole %, 12.7 mole %, 12.8 mole %, 12.9 mole %, 12.0 mole %, 13.1 mole %, 13.2 mole %, 13.3 mole %, 13.4 mole %, 13.5 mole %, 13.6 mole %, 13.7 mole %, 13.8 mole %, 13.9 mole %, or 14.0 mole %; from 10.1 mole % to: 10.1 mole %, 10.2 mole %, 10.3 mole %, 10.4 mole %, 10.5 mole %, 10.6 mole %, 10.7 mole %, 10.8 mole %, 10.9 mole %, 11.0 mole %, 11.1 mole %, 11.2 mole %, 11.3 mole %, 11.4 mole %, 11.5 mole %, 11.6 mole %, 11.7 mole %, 11.8 mole %, 11.9 mole %, 12.0 mole %, 12.1 mole %, 12.2 mole %, 12.3 mole %, 12.4 mole %, 12.5 mole %, 12.6 mole %, 12.7 mole %, 12.8 mole %, 12.9 mole %, 12.0 mole %, 13.1 mole %, 13.2 mole %, 13.3 mole %, 13.4 mole %, 13.5 mole %, 13.6 mole %, 13.7 mole %, 13.8 mole %, 13.9 mole %, or 14.0 mole %; from 10.2 mole % to: 10.3 mole %, 10.4 mole %, 10.5 mole %, 10.6 mole %, 10.7 mole %, 10.8 mole %, 10.9 mole %, 11.0 mole %, 11.1 mole %, 11.2 mole %, 11.3 mole %, 11.4 mole %, 11.5 mole %, 11.6 mole %, 11.7 mole %, 11.8 mole %, 11.9 mole %, 12.0 mole %, 12.1 mole %, 12.2 mole %, 12.3 mole %, 12.4 mole %, 12.5 mole %, 12.6 mole %, 12.7 mole %, 12.8 mole %, 12.9 mole %, 12.0 mole %, 13.1 mole %, 13.2 mole %, 13.3 mole %, 13.4 mole %, 13.5 mole %, 13.6 mole %, 13.7 mole %, 13.8 mole %, 13.9 mole %, or 14.0 mole %; from 10.3 mole % to: 10.4 mole %, 10.5 mole %, 10.6 mole %, 10.7 mole %, 10.8 mole %, 10.9 mole %, 11.0 mole %, 11.1 mole %, 11.2 mole %, 11.3 mole %, 11.4 mole %, 11.5 mole %, 11.6 mole %, 11.7 mole %, 11.8 mole %, 11.9 mole %, 12.0 mole %, 12.1 mole %, 12.2 mole %, 12.3 mole %, 12.4 mole %, 12.5 mole %, 12.6 mole %, 12.7 mole %, 12.8 mole %, 12.9 mole %, 12.0 mole %, 13.1 mole %, 13.2 mole %, 13.3 mole %, 13.4 mole %, 13.5 mole %, 13.6 mole %, 13.7 mole %, 13.8 mole %, 13.9 mole %, or 14.0 mole %; from 10.4 mole % to: 10.5 mole %, 10.6 mole %, 10.7 mole %, 10.8 mole %, 10.9 mole %, 11.0 mole %, 11.1 mole %, 11.2 mole %, 11.3 mole %, 11.4 mole %, 11.5 mole %, 11.6 mole %, 11.7 mole %, 11.8 mole %, 11.9 mole %, 12.0 mole %, 12.1 mole %, 12.2 mole %, 12.3 mole %, 12.4 mole %, 12.5 mole %, 12.6 mole %, 12.7 mole %, 12.8 mole %, 12.9 mole %, 12.0 mole %, 13.1 mole %, 13.2 mole %, 13.3 mole %, 13.4 mole %, 13.5 mole %, 13.6 mole %, 13.7 mole %, 13.8 mole %, 13.9 mole %, or 14.0 mole %; from 10.5 mole % to: 10.6 mole %, 10.7 mole %, 10.8 mole %, 10.9 mole %, 11.0 mole %, 11.1 mole %, 11.2 mole %, 11.3 mole %, 11.4 mole %, 11.5 mole %, 11.6 mole %, 11.7 mole %, 11.8 mole %, 11.9 mole %, 12.0 mole %, 12.1 mole %, 12.2 mole %, 12.3 mole %, 12.4 mole %, 12.5 mole %, 12.6 mole %, 12.7 mole %, 12.8 mole %, 12.9 mole %, 12.0 mole %, 13.1 mole %, 13.2 mole %, 13.3 mole %, 13.4 mole %, 13.5 mole %, 13.6 mole %, 13.7 mole %, 13.8 mole %, 13.9 mole %, or 14.0 mole %; from 10.6 mole % to: 10.7 mole %, 10.8 mole %, 10.9 mole %, 11.0 mole %, 11.1 mole %, 11.2 mole %, 11.3 mole %, 11.4 mole %, 11.5 mole %, 11.6 mole %, 11.7 mole %, 11.8 mole %, 11.9 mole %, 12.0 mole %, 12.1 mole %, 12.2 mole %, 12.3 mole %, 12.4 mole %, 12.5 mole %, 12.6 mole %, 12.7 mole %, 12.8 mole %, 12.9 mole %, 12.0 mole %, 13.1 mole %, 13.2 mole %, 13.3 mole %, 13.4 mole %, 13.5 mole %, 13.6 mole %, 13.7 mole %, 13.8 mole %, 13.9 mole %, or 14.0 mole %; from 10.7 mole % to: 10.8 mole %, 10.9 mole %, 11.0 mole %, 11.1 mole %, 11.2 mole %, 11.3 mole %, 11.4 mole %, 11.5 mole %, 11.6 mole %, 11.7 mole %, 11.8 mole %, 11.9 mole %, 12.0 mole %, 12.1 mole %, 12.2 mole %, 12.3 mole %, 12.4 mole %, 12.5 mole %, 12.6 mole %, 12.7 mole %, 12.8 mole %, 12.9 mole %, 12.0 mole %, 13.1 mole %, 13.2 mole %, 13.3 mole %, 13.4 mole %, 13.5 mole %, 13.6 mole %, 13.7 mole %, 13.8 mole %, 13.9 mole %, or 14.0 mole %; from 10.8 mole % to: 10.9 mole %, 11.0 mole %, 11.1 mole %, 11.2 mole %, 11.3 mole %, 11.4 mole %, 11.5 mole %, 11.6 mole %, 11.7 mole %, 11.8 mole %, 11.9 mole %, 12.0 mole %, 12.1 mole %, 12.2 mole %, 12.3 mole %, 12.4 mole %, 12.5 mole %, 12.6 mole %, 12.7 mole %, 12.8 mole %, 12.9 mole %, 12.0 mole %, 13.1 mole %, 13.2 mole %, 13.3 mole %, 13.4 mole %, 13.5 mole %, 13.6 mole %, 13.7 mole %, 13.8 mole %, 13.9 mole %, or 14.0 mole %; from 10.9 mole % to: 11.0 mole %, 11.1 mole %, 11.2 mole %, 11.3 mole %, 11.4 mole %, 11.5 mole %, 11.6 mole %, 11.7 mole %, 11.8 mole %, 11.9 mole %, 12.0 mole %, 12.1 mole %, 12.2 mole %, 12.3 mole %, 12.4 mole %, 12.5 mole %, 12.6 mole %, 12.7 mole %, 12.8 mole %, 12.9 mole %, 12.0 mole %, 13.1 mole %, 13.2 mole %, 13.3 mole %, 13.4 mole %, 13.5 mole %, 13.6 mole %, 13.7 mole %, 13.8 mole %, 13.9 mole %, or 14.0 mole %; from 11.0 mole % to: 11.1 mole %, 11.2 mole %, 11.3 mole %, 11.4 mole %, 11.5 mole %, 11.6 mole %, 11.7 mole %, 11.8 mole %, 11.9 mole %, 12.0 mole %, 12.1 mole %, 12.2 mole %, 12.3 mole %, 12.4 mole %, 12.5 mole %, 12.6 mole %, 12.7 mole %, 12.8 mole %, 12.9 mole %, 12.0 mole %, 13.1 mole %, 13.2 mole %, 13.3 mole %, 13.4 mole %, 13.5 mole %, 13.6 mole %, 13.7 mole %, 13.8 mole %, 13.9 mole %, or 14.0 mole %; from 11.1 mole % to: 11.2 mole %, 11.3 mole %, 11.4 mole %, 11.5 mole %, 11.6 mole %, 11.7 mole %, 11.8 mole %, 11.9 mole %, 12.0 mole %, 12.1 mole %, 12.2 mole %, 12.3 mole %, 12.4 mole %, 12.5 mole %, 12.6 mole %, 12.7 mole %, 12.8 mole %, 12.9 mole %, 12.0 mole %, 13.1 mole %, 13.2 mole %, 13.3 mole %, 13.4 mole %, 13.5 mole %, 13.6 mole %, 13.7 mole %, 13.8 mole %, 13.9 mole %, or 14.0 mole %; from 11.2 mole % to: 11.3 mole %, 11.4 mole %, 11.5 mole %, 11.6 mole %, 11.7 mole %, 11.8 mole %, 11.9 mole %, 12.0 mole %, 12.1 mole %, 12.2 mole %, 12.3 mole %, 12.4 mole %, 12.5 mole %, 12.6 mole %, 12.7 mole %, 12.8 mole %, 12.9 mole %, 12.0 mole %, 13.1 mole %, 13.2 mole %, 13.3 mole %, 13.4 mole %, 13.5 mole %, 13.6 mole %, 13.7 mole %, 13.8 mole %, 13.9 mole %, or 14.0 mole %; from 11.3 mole % to: 11.4 mole %, 11.5 mole %, 11.6 mole %, 11.7 mole %, 11.8 mole %, 11.9 mole %, 12.0 mole %, 12.1 mole %, 12.2 mole %, 12.3 mole %, 12.4 mole %, 12.5 mole %, 12.6 mole %, 12.7 mole %, 12.8 mole %, 12.9 mole %, 12.0 mole %, 13.1 mole %, 13.2 mole %, 13.3 mole %, 13.4 mole %, 13.5 mole %, 13.6 mole %, 13.7 mole %, 13.8 mole %, 13.9 mole %, or 14.0 mole %; from 11.4 mole % to: 11.5 mole %, 11.6 mole %, 11.7 mole %, 11.8 mole %, 11.9 mole %, 12.0 mole %, 12.1 mole %, 12.2 mole %, 12.3 mole %, 12.4 mole %, 12.5 mole %, 12.6 mole %, 12.7 mole %, 12.8 mole %, 12.9 mole %, 12.0 mole %, 13.1 mole %, 13.2 mole %, 13.3 mole %, 13.4 mole %, 13.5 mole %, 13.6 mole %, 13.7 mole %, 13.8 mole %, 13.9 mole %, or 14.0 mole %; from 11.5 mole % to: 11.6 mole %, 11.7 mole %, 11.8 mole %, 11.9 mole %, 12.0 mole %, 12.1 mole %, 12.2 mole %, 12.3 mole %, 12.4 mole %, 12.5 mole %, 12.6 mole %, 12.7 mole %, 12.8 mole %, 12.9 mole %, 12.0 mole %, 13.1 mole %, 13.2 mole %, 13.3 mole %, 13.4 mole %, 13.5 mole %, 13.6 mole %, 13.7 mole %, 13.8 mole %, 13.9 mole %, or 14.0 mole %; from 11.6 mole % to: 11.7 mole %, 11.8 mole %, 11.9 mole %, 12.0 mole %, 12.1 mole %, 12.2 mole %, 12.3 mole %, 12.4 mole %, 12.5 mole %, 12.6 mole %, 12.7 mole %, 12.8 mole %, 12.9 mole %, 12.0 mole %, 13.1 mole %, 13.2 mole %, 13.3 mole %, 13.4 mole %, 13.5 mole %, 13.6 mole %, 13.7 mole %, 13.8 mole %, 13.9 mole %, or 14.0 mole %; from 11.7 mole % to: 11.8 mole %, 11.9 mole %, 12.0 mole %, 12.1 mole %, 12.2 mole %, 12.3 mole %, 12.4 mole %, 12.5 mole %, 12.6 mole %, 12.7 mole %, 12.8 mole %, 12.9 mole %, 12.0 mole %, 13.1 mole %, 13.2 mole %, 13.3 mole %, 13.4 mole %, 13.5 mole %, 13.6 mole %, 13.7 mole %, 13.8 mole %, 13.9 mole %, or 14.0 mole %; from 11.8 mole % to: 11.9 mole %, 12.0 mole %, 12.1 mole %, 12.2 mole %, 12.3 mole %, 12.4 mole %, 12.5 mole %, 12.6 mole %, 12.7 mole %, 12.8 mole %, 12.9 mole %, 12.0 mole %, 13.1 mole %, 13.2 mole %, 13.3 mole %, 13.4 mole %, 13.5 mole %, 13.6 mole %, 13.7 mole %, 13.8 mole %, 13.9 mole %, or 14.0 mole %; or from 11.9 mole % to: 12.0 mole %, 12.1 mole %, 12.2 mole %, 12.3 mole %, 12.4 mole %, 12.5 mole %, 12.6 mole %, 12.7 mole %, 12.8 mole %, 12.9 mole %, 12.0 mole %, 13.1 mole %, 13.2 mole %, 13.3 mole %, 13.4 mole %, 13.5 mole %, 13.6 mole %, 13.7 mole %, 13.8 mole %, 13.9 mole %, or 14.0 mole %; or from 12.0 mole % to: 12.1 mole %, 12.2 mole %, 12.3 mole %, 12.4 mole %, 12.5 mole %, 12.6 mole %, 12.7 mole %, 12.8 mole %, 12.9 mole %, 12.0 mole %, 13.1 mole %, 13.2 mole %, 13.3 mole %, 13.4 mole %, 13.5 mole %, 13.6 mole %, 13.7 mole %, 13.8 mole %, 13.9 mole %, or 14.0 mole % of second lipid. Also contemplated and supported are combinations of the above-noted “mole %” of “at least” or “mole %” of “no more than” with the mole % of second lipid provided in the Examples section of this document. Also contemplated and supported are combinations of the mole % of the Example section of this document to provide a range (i.e. mole % from [the mole % of second lipid of the lipids of the LNP formulation X₁ in the Examples] to [the mole % of second lipid of the lipids of the LNP formulation X₂ in the Examples] wherein X₁ and X₂ represent any two exemplary LNP formulations of the Examples.

[0465] In some embodiments, the lipids in the LNP have, comprise, consist of, consist essentially of, or are at least a mole amount of the second lipid of 0.01-times, 0.02-times, 0.03-times, 0.04-times, 0.05-times, 0.06-times, 0.07-times, 0.08-times, 0.09-times, 0.10-times, 0.11-times, 0.12-times, 0.13-times, 0.14-times, 0.15-times, 0.16-times, 0.17-times, 0.18-times, 0.19-times, 0.20-times, 0.21-times, 0.22-times, 0.23-times, 0.24-times, 0.25-times, 0.26-times, 0.27-times, 0.28-times, 0.29-times, 0.30-times, 0.31-times, 0.32-times, 0.33-times, 0.34-times, 0.35-times, 0.36-times, 0.37-times, 0.38-times, 0.39-times, 0.40-times, 0.41-times, 0.42-times, 0.43-times, 0.44-times, 0.45-times, 0.46-times, 0.47-times, 0.48-times, 0.49-times, 0.50-times, 0.51-times, 0.52-times, 0.53-times, 0.54-times, 0.55-times, 0.56-times, 0.57-times, 0.58-times, 0.59-times, 0.60-times, 0.61-times, 0.62-times, 0.63-times, 0.64-times, 0.65-times, 0.66-times, 0.67-times, 0.68-times, 0.69-times, or 0.70-times the mole amount of the first lipid. In some embodiments, the lipids in the LNP have, comprise, consist of, consist essentially of, or are no more than a mole amount of the second lipid of 1.0-times, 0.99-times, 0.98-times, 0.97-times, 0.96-times, 0.95-times, 0.94-times, 0.93-times, 0.92-times, 0.91-times, 0.90-times, 0.89-times, 0.88-times, 0.87-times, 0.86-times, 0.85-times, 0.84-times, 0.83-times, 0.82-times, 0.81-times, 0.80-times, 0.79-times, 0.78-times, 0.77-times, 0.76-times, 0.75-times, 0.74-times, 0.73-times, 0.72-times, 0.71-times, 0.70-times, 0.69-times, 0.68-times, 0.67-times, 0.66-times, 0.65-times, 0.64-times, 0.63-times, 0.62-times, 0.61-times, 0.60-times, 0.59-times, 0.58-times, 0.57-times, 0.56-times, 0.55-times, 0.54-times, 0.53-times, 0.52-times, 0.51-times, 0.50-times, 0.49-times, 0.48-times, 0.47-times, 0.46-times, 0.45-times, 0.44-times, 0.43-times, 0.42-times, 0.41-times, 0.40-times, 0.39-times, 0.38-times, 0.37-times, 0.36-times, 0.35-times, 0.34-times, 0.33-times, 0.32-times, 0.31-times, 0.30-times, 0.29-times, 0.28-times, 0.27-times, 0.26-times, 0.25-times, 0.24-times, 0.23-times, 0.22-times, 0.21-times, 0.20-times, 0.19-times, 0.18-times, 0.17-times, 0.16-times, 0.15-times, 0.14-times, 0.13-times, 0.12-times, 0.11-times, 0.10-times, 0.09-times, 0.08-times, 0.07-times, 0.06-times, 0.05-times, 0.04-times, 0.03-times, 0.02-times, 0.01-times, or 0.0-times the mole amount of the first lipid. Taking the above-noted embodiments into account, it is contemplated and supported that any of the above-noted “at least a mole amount of the second lipid of X-times the mole amount of the first lipid” and “no more than a mole amount of the second lipid of Y-times the mole amount of the first lipid” may be combined to provide an enclosed range (i.e. the lipids in the LNP comprise a mole amount of the second lipid that is from 0.1-times to 0.2-times the amount of the first lipid). Also contemplated and supported are combinations of the above-noted “at least a mole amount of the second lipid of X-times the mole amount of the first lipid” and “no more than a mole amount of the second lipid of Y-times the mole amount of the first lipid” with that provided in the Examples section of this document. Also contemplated and supported are combinations of the “mole amount of the second lipid of X-times the mole amount of the first lipid” of the Example section of this document to provide a range (i.e. the lipids in the LNP comprise a mole amount of the second lipid that is from X₁-times to X₂-times the amount of the first lipid wherein X₁ and X₂ represent the mole amount of any second lipids relative to the mole amount of the first lipid of any two exemplary LNP formulations of the Examples.

[0466] In some embodiments, the lipids in the LNP have any of the following mole % in combination:

| | | | second | | | | second | | |
|---|---|---|---|---|---|---|---|---|---|
| | | polymer- | lipid | | | polymer- | lipid | | |
| first | | conjugated | (i.e | first | | conjugated | (i.e | first | |
| lipid | | lipid | anionic, | lipid | | lipid | anionic, | lipid | |
| (i.e. | | (i.e. | neutral, | (i.e. | | (i.e. | neutral, | (i.e. | |
| cation- | sterol | PEG- | or | cation- | sterol | PEG- | or | cation- | sterol |
| ionizable | (i.e. | conjugated | zwitterionic | ionizable | (i.e. | conjugated | zwitterionic | ionizable | (i.e. |
| lipid) | cholesterol | lipid) | lipid) | lipid | cholesterol | lipid) | lipid) | lipid | cholesterol |
| (mole %) | (mole %) | (mole %) | (mole %) | (mole %) | (mole %) | (mole %) | (mole %) | (mole %) | (mole %) |
| 60 | 39 | 1 | 0 | 60 | 38 | 1 | 1 | 60 | 37 |
| 59 | 40 | 1 | 0 | 59 | 39 | 1 | 1 | 59 | 38 |
| 58 | 41 | 1 | 0 | 58 | 40 | 1 | 1 | 58 | 39 |
| 57 | 42 | 1 | 0 | 57 | 41 | 1 | 1 | 57 | 40 |
| 56 | 43 | 1 | 0 | 56 | 42 | 1 | 1 | 56 | 41 |
| 55 | 44 | 1 | 0 | 55 | 43 | 1 | 1 | 55 | 42 |
| 54 | 45 | 1 | 0 | 54 | 44 | 1 | 1 | 54 | 43 |
| 53 | 46 | 1 | 0 | 53 | 45 | 1 | 1 | 53 | 44 |
| 52 | 47 | 1 | 0 | 52 | 46 | 1 | 1 | 52 | 45 |
| 51 | 48 | 1 | 0 | 51 | 47 | 1 | 1 | 51 | 46 |
| 50 | 49 | 1 | 0 | 50 | 48 | 1 | 1 | 50 | 47 |
| 49 | 50 | 1 | 0 | 49 | 49 | 1 | 1 | 49 | 48 |
| 48 | 51 | 1 | 0 | 48 | 50 | 1 | 1 | 48 | 49 |
| 47 | 52 | 1 | 0 | 47 | 51 | 1 | 1 | 47 | 50 |
| 46 | 53 | 1 | 0 | 46 | 52 | 1 | 1 | 46 | 51 |
| 45 | 54 | 1 | 0 | 45 | 53 | 1 | 1 | 45 | 52 |
| 44 | 55 | 1 | 0 | 44 | 54 | 1 | 1 | 44 | 53 |
| 43 | 56 | 1 | 0 | 43 | 55 | 1 | 1 | 43 | 54 |
| 42 | 57 | 1 | 0 | 42 | 56 | 1 | 1 | 42 | 55 |
| 41 | 58 | 1 | 0 | 41 | 57 | 1 | 1 | 41 | 56 |
| 40 | 59 | 1 | 0 | 40 | 58 | 1 | 1 | 40 | 57 |
| 39 | 60 | 1 | 0 | 39 | 59 | 1 | 1 | 39 | 58 |
| 38 | 61 | 1 | 0 | 38 | 60 | 1 | 1 | 38 | 59 |
| 37 | 62 | 1 | 0 | 37 | 61 | 1 | 1 | 37 | 60 |
| 36 | 63 | 1 | 0 | 36 | 62 | 1 | 1 | 36 | 61 |
| 35 | 64 | 1 | 0 | 35 | 63 | 1 | 1 | 35 | 62 |
| 34 | 65 | 1 | 0 | 34 | 64 | 1 | 1 | 34 | 63 |
| 33 | 66 | 1 | 0 | 33 | 65 | 1 | 1 | 33 | 64 |
| 32 | 67 | 1 | 0 | 32 | 66 | 1 | 1 | 32 | 65 |
| 31 | 68 | 1 | 0 | 31 | 67 | 1 | 1 | 31 | 66 |
| 30 | 69 | 1 | 0 | 30 | 68 | 1 | 1 | 30 | 67 |
| 60 | 38.8 | 1.2 | 0 | 60 | 37.8 | 1.2 | 1 | 60 | 36.8 |
| 59 | 39.8 | 1.2 | 0 | 59 | 38.8 | 1.2 | 1 | 59 | 37.8 |
| 58 | 40.8 | 1.2 | 0 | 58 | 39.8 | 1.2 | 1 | 58 | 38.8 |
| 57 | 41.8 | 1.2 | 0 | 57 | 40.8 | 1.2 | 1 | 57 | 39.8 |
| 56 | 42.8 | 1.2 | 0 | 56 | 41.8 | 1.2 | 1 | 56 | 40.8 |
| 55 | 43.8 | 1.2 | 0 | 55 | 42.8 | 1.2 | 1 | 55 | 41.8 |
| 54 | 44.8 | 1.2 | 0 | 54 | 43.8 | 1.2 | 1 | 54 | 42.8 |
| 53 | 45.8 | 1.2 | 0 | 53 | 44.8 | 1.2 | 1 | 53 | 43.8 |
| 52 | 46.8 | 1.2 | 0 | 52 | 45.8 | 1.2 | 1 | 52 | 44.8 |
| 51 | 47.8 | 1.2 | 0 | 51 | 46.8 | 1.2 | 1 | 51 | 45.8 |
| 50 | 48.8 | 1.2 | 0 | 50 | 47.8 | 1.2 | 1 | 50 | 46.8 |
| 49 | 49.8 | 1.2 | 0 | 49 | 48.8 | 1.2 | 1 | 49 | 47.8 |
| 48 | 50.8 | 1.2 | 0 | 48 | 49.8 | 1.2 | 1 | 48 | 48.8 |
| 47 | 51.8 | 1.2 | 0 | 47 | 50.8 | 1.2 | 1 | 47 | 49.8 |
| 46 | 52.8 | 1.2 | 0 | 46 | 51.8 | 1.2 | 1 | 46 | 50.8 |
| 45 | 53.8 | 1.2 | 0 | 45 | 52.8 | 1.2 | 1 | 45 | 51.8 |
| 44 | 54.8 | 1.2 | 0 | 44 | 53.8 | 1.2 | 1 | 44 | 52.8 |
| 43 | 55.8 | 1.2 | 0 | 43 | 54.8 | 1.2 | 1 | 43 | 53.8 |
| 42 | 56.8 | 1.2 | 0 | 42 | 55.8 | 1.2 | 1 | 42 | 54.8 |
| 41 | 57.8 | 1.2 | 0 | 41 | 56.8 | 1.2 | 1 | 41 | 55.8 |
| 40 | 58.8 | 1.2 | 0 | 40 | 57.8 | 1.2 | 1 | 40 | 56.8 |
| 39 | 59.8 | 1.2 | 0 | 39 | 58.8 | 1.2 | 1 | 39 | 57.8 |
| 38 | 60.8 | 1.2 | 0 | 38 | 59.8 | 1.2 | 1 | 38 | 58.8 |
| 37 | 61.8 | 1.2 | 0 | 37 | 60.8 | 1.2 | 1 | 37 | 59.8 |
| 36 | 62.8 | 1.2 | 0 | 36 | 61.8 | 1.2 | 1 | 36 | 60.8 |
| 35 | 63.8 | 1.2 | 0 | 35 | 62.8 | 1.2 | 1 | 35 | 61.8 |
| 34 | 64.8 | 1.2 | 0 | 34 | 63.8 | 1.2 | 1 | 34 | 62.8 |
| 33 | 65.8 | 1.2 | 0 | 33 | 64.8 | 1.2 | 1 | 33 | 63.8 |
| 32 | 66.8 | 1.2 | 0 | 32 | 65.8 | 1.2 | 1 | 32 | 64.8 |
| 31 | 67.8 | 1.2 | 0 | 31 | 66.8 | 1.2 | 1 | 31 | 65.8 |
| 30 | 68.8 | 1.2 | 0 | 30 | 67.8 | 1.2 | 1 | 30 | 66.8 |
| 60 | 38.6 | 1.4 | 0 | 60 | 37.6 | 1.4 | 1 | 60 | 36.6 |
| 59 | 39.6 | 1.4 | 0 | 59 | 38.6 | 1.4 | 1 | 59 | 37.6 |
| 58 | 40.6 | 1.4 | 0 | 58 | 39.6 | 1.4 | 1 | 58 | 38.6 |
| 57 | 41.6 | 1.4 | 0 | 57 | 40.6 | 1.4 | 1 | 57 | 39.6 |
| 56 | 42.6 | 1.4 | 0 | 56 | 41.6 | 1.4 | 1 | 56 | 40.6 |
| 55 | 43.6 | 1.4 | 0 | 55 | 42.6 | 1.4 | 1 | 55 | 41.6 |
| 54 | 44.6 | 1.4 | 0 | 54 | 43.6 | 1.4 | 1 | 54 | 42.6 |
| 53 | 45.6 | 1.4 | 0 | 53 | 44.6 | 1.4 | 1 | 53 | 43.6 |
| 52 | 46.6 | 1.4 | 0 | 52 | 45.6 | 1.4 | 1 | 52 | 44.6 |
| 51 | 47.6 | 1.4 | 0 | 51 | 46.6 | 1.4 | 1 | 51 | 45.6 |
| 50 | 48.6 | 1.4 | 0 | 50 | 47.6 | 1.4 | 1 | 50 | 46.6 |
| 49 | 49.6 | 1.4 | 0 | 49 | 48.6 | 1.4 | 1 | 49 | 47.6 |
| 48 | 50.6 | 1.4 | 0 | 48 | 49.6 | 1.4 | 1 | 48 | 48.6 |
| 47 | 51.6 | 1.4 | 0 | 47 | 50.6 | 1.4 | 1 | 47 | 49.6 |
| 46 | 52.6 | 1.4 | 0 | 46 | 51.6 | 1.4 | 1 | 46 | 50.6 |
| 45 | 53.6 | 1.4 | 0 | 45 | 52.6 | 1.4 | 1 | 45 | 51.6 |
| 44 | 54.6 | 1.4 | 0 | 44 | 53.6 | 1.4 | 1 | 44 | 52.6 |
| 43 | 55.6 | 1.4 | 0 | 43 | 54.6 | 1.4 | 1 | 43 | 53.6 |
| 42 | 56.6 | 1.4 | 0 | 42 | 55.6 | 1.4 | 1 | 42 | 54.6 |
| 41 | 57.6 | 1.4 | 0 | 41 | 56.6 | 1.4 | 1 | 41 | 55.6 |
| 40 | 58.6 | 1.4 | 0 | 40 | 57.6 | 1.4 | 1 | 40 | 56.6 |
| 39 | 59.6 | 1.4 | 0 | 39 | 58.6 | 1.4 | 1 | 39 | 57.6 |
| 38 | 60.6 | 1.4 | 0 | 38 | 59.6 | 1.4 | 1 | 38 | 58.6 |
| 37 | 61.6 | 1.4 | 0 | 37 | 60.6 | 1.4 | 1 | 37 | 59.6 |
| 36 | 62.6 | 1.4 | 0 | 36 | 61.6 | 1.4 | 1 | 36 | 60.6 |
| 35 | 63.6 | 1.4 | 0 | 35 | 62.6 | 1.4 | 1 | 35 | 61.6 |
| 34 | 64.6 | 1.4 | 0 | 34 | 63.6 | 1.4 | 1 | 34 | 62.6 |
| 33 | 65.6 | 1.4 | 0 | 33 | 64.6 | 1.4 | 1 | 33 | 63.6 |
| 32 | 66.6 | 1.4 | 0 | 32 | 65.6 | 1.4 | 1 | 32 | 64.6 |
| 31 | 67.6 | 1.4 | 0 | 31 | 66.6 | 1.4 | 1 | 31 | 65.6 |
| 30 | 68.6 | 1.4 | 0 | 30 | 67.6 | 1.4 | 1 | 30 | 66.6 |
| 60 | 38.4 | 1.6 | 0 | 60 | 37.4 | 1.6 | 1 | 60 | 36.4 |
| 59 | 39.4 | 1.6 | 0 | 59 | 38.4 | 1.6 | 1 | 59 | 37.4 |
| 58 | 40.4 | 1.6 | 0 | 58 | 39.4 | 1.6 | 1 | 58 | 38.4 |
| 57 | 41.4 | 1.6 | 0 | 57 | 40.4 | 1.6 | 1 | 57 | 39.4 |
| 56 | 42.4 | 1.6 | 0 | 56 | 41.4 | 1.6 | 1 | 56 | 40.4 |
| 55 | 43.4 | 1.6 | 0 | 55 | 42.4 | 1.6 | 1 | 55 | 41.4 |
| 54 | 44.4 | 1.6 | 0 | 54 | 43.4 | 1.6 | 1 | 54 | 42.4 |
| 53 | 45.4 | 1.6 | 0 | 53 | 44.4 | 1.6 | 1 | 53 | 43.4 |
| 52 | 46.4 | 1.6 | 0 | 52 | 45.4 | 1.6 | 1 | 52 | 44.4 |
| 51 | 47.4 | 1.6 | 0 | 51 | 46.4 | 1.6 | 1 | 51 | 45.4 |
| 50 | 48.4 | 1.6 | 0 | 50 | 47.4 | 1.6 | 1 | 50 | 46.4 |
| 49 | 49.4 | 1.6 | 0 | 49 | 48.4 | 1.6 | 1 | 49 | 47.4 |
| 48 | 50.4 | 1.6 | 0 | 48 | 49.4 | 1.6 | 1 | 48 | 48.4 |
| 47 | 51.4 | 1.6 | 0 | 47 | 50.4 | 1.6 | 1 | 47 | 49.4 |
| 46 | 52.4 | 1.6 | 0 | 46 | 51.4 | 1.6 | 1 | 46 | 50.4 |
| 45 | 53.4 | 1.6 | 0 | 45 | 52.4 | 1.6 | 1 | 45 | 51.4 |
| 44 | 54.4 | 1.6 | 0 | 44 | 53.4 | 1.6 | 1 | 44 | 52.4 |
| 43 | 55.4 | 1.6 | 0 | 43 | 54.4 | 1.6 | 1 | 43 | 53.4 |
| 42 | 56.4 | 1.6 | 0 | 42 | 55.4 | 1.6 | 1 | 42 | 54.4 |
| 41 | 57.4 | 1.6 | 0 | 41 | 56.4 | 1.6 | 1 | 41 | 55.4 |
| 40 | 58.4 | 1.6 | 0 | 40 | 57.4 | 1.6 | 1 | 40 | 56.4 |
| 39 | 59.4 | 1.6 | 0 | 39 | 58.4 | 1.6 | 1 | 39 | 57.4 |
| 38 | 60.4 | 1.6 | 0 | 38 | 59.4 | 1.6 | 1 | 38 | 58.4 |
| 37 | 61.4 | 1.6 | 0 | 37 | 60.4 | 1.6 | 1 | 37 | 59.4 |
| 36 | 62.4 | 1.6 | 0 | 36 | 61.4 | 1.6 | 1 | 36 | 60.4 |
| 35 | 63.4 | 1.6 | 0 | 35 | 62.4 | 1.6 | 1 | 35 | 61.4 |
| 34 | 64.4 | 1.6 | 0 | 34 | 63.4 | 1.6 | 1 | 34 | 62.4 |
| 33 | 65.4 | 1.6 | 0 | 33 | 64.4 | 1.6 | 1 | 33 | 63.4 |
| 32 | 66.4 | 1.6 | 0 | 32 | 65.4 | 1.6 | 1 | 32 | 64.4 |
| 31 | 67.4 | 1.6 | 0 | 31 | 66.4 | 1.6 | 1 | 31 | 65.4 |
| 30 | 68.4 | 1.6 | 0 | 30 | 67.4 | 1.6 | 1 | 30 | 66.4 |
| 60 | 38.2 | 1.8 | 0 | 60 | 37.2 | 1.8 | 1 | 60 | 36.2 |
| 59 | 39.2 | 1.8 | 0 | 59 | 38.2 | 1.8 | 1 | 59 | 37.2 |
| 58 | 40.2 | 1.8 | 0 | 58 | 39.2 | 1.8 | 1 | 58 | 38.2 |
| 57 | 41.2 | 1.8 | 0 | 57 | 40.2 | 1.8 | 1 | 57 | 39.2 |
| 56 | 42.2 | 1.8 | 0 | 56 | 41.2 | 1.8 | 1 | 56 | 40.2 |
| 55 | 43.2 | 1.8 | 0 | 55 | 42.2 | 1.8 | 1 | 55 | 41.2 |
| 54 | 44.2 | 1.8 | 0 | 54 | 43.2 | 1.8 | 1 | 54 | 42.2 |
| 53 | 45.2 | 1.8 | 0 | 53 | 44.2 | 1.8 | 1 | 53 | 43.2 |
| 52 | 46.2 | 1.8 | 0 | 52 | 45.2 | 1.8 | 1 | 52 | 44.2 |
| 51 | 47.2 | 1.8 | 0 | 51 | 46.2 | 1.8 | 1 | 51 | 45.2 |
| 50 | 48.2 | 1.8 | 0 | 50 | 47.2 | 1.8 | 1 | 50 | 46.2 |
| 49 | 49.2 | 1.8 | 0 | 49 | 48.2 | 1.8 | 1 | 49 | 47.2 |
| 48 | 50.2 | 1.8 | 0 | 48 | 49.2 | 1.8 | 1 | 48 | 48.2 |
| 47 | 51.2 | 1.8 | 0 | 47 | 50.2 | 1.8 | 1 | 47 | 49.2 |
| 46 | 52.2 | 1.8 | 0 | 46 | 51.2 | 1.8 | 1 | 46 | 50.2 |
| 45 | 53.2 | 1.8 | 0 | 45 | 52.2 | 1.8 | 1 | 45 | 51.2 |
| 44 | 54.2 | 1.8 | 0 | 44 | 53.2 | 1.8 | 1 | 44 | 52.2 |
| 43 | 55.2 | 1.8 | 0 | 43 | 54.2 | 1.8 | 1 | 43 | 53.2 |
| 42 | 56.2 | 1.8 | 0 | 42 | 55.2 | 1.8 | 1 | 42 | 54.2 |
| 41 | 57.2 | 1.8 | 0 | 41 | 56.2 | 1.8 | 1 | 41 | 55.2 |
| 40 | 58.2 | 1.8 | 0 | 40 | 57.2 | 1.8 | 1 | 40 | 56.2 |
| 39 | 59.2 | 1.8 | 0 | 39 | 58.2 | 1.8 | 1 | 39 | 57.2 |
| 38 | 60.2 | 1.8 | 0 | 38 | 59.2 | 1.8 | 1 | 38 | 58.2 |
| 37 | 61.2 | 1.8 | 0 | 37 | 60.2 | 1.8 | 1 | 37 | 59.2 |
| 36 | 62.2 | 1.8 | 0 | 36 | 61.2 | 1.8 | 1 | 36 | 60.2 |
| 35 | 63.2 | 1.8 | 0 | 35 | 62.2 | 1.8 | 1 | 35 | 61.2 |
| 34 | 64.2 | 1.8 | 0 | 34 | 63.2 | 1.8 | 1 | 34 | 62.2 |
| 33 | 65.2 | 1.8 | 0 | 33 | 64.2 | 1.8 | 1 | 33 | 63.2 |
| 32 | 66.2 | 1.8 | 0 | 32 | 65.2 | 1.8 | 1 | 32 | 64.2 |
| 31 | 67.2 | 1.8 | 0 | 31 | 66.2 | 1.8 | 1 | 31 | 65.2 |
| 30 | 68.2 | 1.8 | 0 | 30 | 67.2 | 1.8 | 1 | 30 | 66.2 |
| 60 | 38 | 2 | 0 | 60 | 37 | 2 | 1 | 60 | 36 |
| 59 | 39 | 2 | 0 | 59 | 38 | 2 | 1 | 59 | 37 |
| 58 | 40 | 2 | 0 | 58 | 39 | 2 | 1 | 58 | 38 |
| 57 | 41 | 2 | 0 | 57 | 40 | 2 | 1 | 57 | 39 |
| 56 | 42 | 2 | 0 | 56 | 41 | 2 | 1 | 56 | 40 |
| 55 | 43 | 2 | 0 | 55 | 42 | 2 | 1 | 55 | 41 |
| 54 | 44 | 2 | 0 | 54 | 43 | 2 | 1 | 54 | 42 |
| 53 | 45 | 2 | 0 | 53 | 44 | 2 | 1 | 53 | 43 |
| 52 | 46 | 2 | 0 | 52 | 45 | 2 | 1 | 52 | 44 |
| 51 | 47 | 2 | 0 | 51 | 46 | 2 | 1 | 51 | 45 |
| 50 | 48 | 2 | 0 | 50 | 47 | 2 | 1 | 50 | 46 |
| 49 | 49 | 2 | 0 | 49 | 48 | 2 | 1 | 49 | 47 |
| 48 | 50 | 2 | 0 | 48 | 49 | 2 | 1 | 48 | 48 |
| 47 | 51 | 2 | 0 | 47 | 50 | 2 | 1 | 47 | 49 |
| 46 | 52 | 2 | 0 | 46 | 51 | 2 | 1 | 46 | 50 |
| 45 | 53 | 2 | 0 | 45 | 52 | 2 | 1 | 45 | 51 |
| 44 | 54 | 2 | 0 | 44 | 53 | 2 | 1 | 44 | 52 |
| 43 | 55 | 2 | 0 | 43 | 54 | 2 | 1 | 43 | 53 |
| 42 | 56 | 2 | 0 | 42 | 55 | 2 | 1 | 42 | 54 |
| 41 | 57 | 2 | 0 | 41 | 56 | 2 | 1 | 41 | 55 |
| 40 | 58 | 2 | 0 | 40 | 57 | 2 | 1 | 40 | 56 |
| 39 | 59 | 2 | 0 | 39 | 58 | 2 | 1 | 39 | 57 |
| 38 | 60 | 2 | 0 | 38 | 59 | 2 | 1 | 38 | 58 |
| 37 | 61 | 2 | 0 | 37 | 60 | 2 | 1 | 37 | 59 |
| 36 | 62 | 2 | 0 | 36 | 61 | 2 | 1 | 36 | 60 |
| 35 | 63 | 2 | 0 | 35 | 62 | 2 | 1 | 35 | 61 |
| 34 | 64 | 2 | 0 | 34 | 63 | 2 | 1 | 34 | 62 |
| 33 | 65 | 2 | 0 | 33 | 64 | 2 | 1 | 33 | 63 |
| 32 | 66 | 2 | 0 | 32 | 65 | 2 | 1 | 32 | 64 |
| 31 | 67 | 2 | 0 | 31 | 66 | 2 | 1 | 31 | 65 |
| 30 | 68 | 2 | 0 | 30 | 67 | 2 | 1 | 30 | 66 |
| 60 | 37.8 | 2.2 | 0 | 60 | 36.8 | 2.2 | 1 | 60 | 35.8 |
| 59 | 38.8 | 2.2 | 0 | 59 | 37.8 | 2.2 | 1 | 59 | 36.8 |
| 58 | 39.8 | 2.2 | 0 | 58 | 38.8 | 2.2 | 1 | 58 | 37.8 |
| 57 | 40.8 | 2.2 | 0 | 57 | 39.8 | 2.2 | 1 | 57 | 38.8 |
| 56 | 41.8 | 2.2 | 0 | 56 | 40.8 | 2.2 | 1 | 56 | 39.8 |
| 55 | 42.8 | 2.2 | 0 | 55 | 41.8 | 2.2 | 1 | 55 | 40.8 |
| 54 | 43.8 | 2.2 | 0 | 54 | 42.8 | 2.2 | 1 | 54 | 41.8 |
| 53 | 44.8 | 2.2 | 0 | 53 | 43.8 | 2.2 | 1 | 53 | 42.8 |
| 52 | 45.8 | 2.2 | 0 | 52 | 44.8 | 2.2 | 1 | 52 | 43.8 |
| 51 | 46.8 | 2.2 | 0 | 51 | 45.8 | 2.2 | 1 | 51 | 44.8 |
| 50 | 47.8 | 2.2 | 0 | 50 | 46.8 | 2.2 | 1 | 50 | 45.8 |
| 49 | 48.8 | 2.2 | 0 | 49 | 47.8 | 2.2 | 1 | 49 | 46.8 |
| 48 | 49.8 | 2.2 | 0 | 48 | 48.8 | 2.2 | 1 | 48 | 47.8 |
| 47 | 50.8 | 2.2 | 0 | 47 | 49.8 | 2.2 | 1 | 47 | 48.8 |
| 46 | 51.8 | 2.2 | 0 | 46 | 50.8 | 2.2 | 1 | 46 | 49.8 |
| 45 | 52.8 | 2.2 | 0 | 45 | 51.8 | 2.2 | 1 | 45 | 50.8 |
| 44 | 53.8 | 2.2 | 0 | 44 | 52.8 | 2.2 | 1 | 44 | 51.8 |
| 43 | 54.8 | 2.2 | 0 | 43 | 53.8 | 2.2 | 1 | 43 | 52.8 |
| 42 | 55.8 | 2.2 | 0 | 42 | 54.8 | 2.2 | 1 | 42 | 53.8 |
| 41 | 56.8 | 2.2 | 0 | 41 | 55.8 | 2.2 | 1 | 41 | 54.8 |
| 40 | 57.8 | 2.2 | 0 | 40 | 56.8 | 2.2 | 1 | 40 | 55.8 |
| 39 | 58.8 | 2.2 | 0 | 39 | 57.8 | 2.2 | 1 | 39 | 56.8 |
| 38 | 59.8 | 2.2 | 0 | 38 | 58.8 | 2.2 | 1 | 38 | 57.8 |
| 37 | 60.8 | 2.2 | 0 | 37 | 59.8 | 2.2 | 1 | 37 | 58.8 |
| 36 | 61.8 | 2.2 | 0 | 36 | 60.8 | 2.2 | 1 | 36 | 59.8 |
| 35 | 62.8 | 2.2 | 0 | 35 | 61.8 | 2.2 | 1 | 35 | 60.8 |
| 34 | 63.8 | 2.2 | 0 | 34 | 62.8 | 2.2 | 1 | 34 | 61.8 |
| 33 | 64.8 | 2.2 | 0 | 33 | 63.8 | 2.2 | 1 | 33 | 62.8 |
| 32 | 65.8 | 2.2 | 0 | 32 | 64.8 | 2.2 | 1 | 32 | 63.8 |
| 31 | 66.8 | 2.2 | 0 | 31 | 65.8 | 2.2 | 1 | 31 | 64.8 |
| 30 | 67.8 | 2.2 | 0 | 30 | 66.8 | 2.2 | 1 | 30 | 65.8 |
| 60 | 37.6 | 2.4 | 0 | 60 | 36.6 | 2.4 | 1 | 60 | 35.6 |
| 59 | 38.6 | 2.4 | 0 | 59 | 37.6 | 2.4 | 1 | 59 | 36.6 |
| 58 | 39.6 | 2.4 | 0 | 58 | 38.6 | 2.4 | 1 | 58 | 37.6 |
| 57 | 40.6 | 2.4 | 0 | 57 | 39.6 | 2.4 | 1 | 57 | 38.6 |
| 56 | 41.6 | 2.4 | 0 | 56 | 40.6 | 2.4 | 1 | 56 | 39.6 |
| 55 | 42.6 | 2.4 | 0 | 55 | 41.6 | 2.4 | 1 | 55 | 40.6 |
| 54 | 43.6 | 2.4 | 0 | 54 | 42.6 | 2.4 | 1 | 54 | 41.6 |
| 53 | 44.6 | 2.4 | 0 | 53 | 43.6 | 2.4 | 1 | 53 | 42.6 |
| 52 | 45.6 | 2.4 | 0 | 52 | 44.6 | 2.4 | 1 | 52 | 43.6 |
| 51 | 46.6 | 2.4 | 0 | 51 | 45.6 | 2.4 | 1 | 51 | 44.6 |
| 50 | 47.6 | 2.4 | 0 | 50 | 46.6 | 2.4 | 1 | 50 | 45.6 |
| 49 | 48.6 | 2.4 | 0 | 49 | 47.6 | 2.4 | 1 | 49 | 46.6 |
| 48 | 49.6 | 2.4 | 0 | 48 | 48.6 | 2.4 | 1 | 48 | 47.6 |
| 47 | 50.6 | 2.4 | 0 | 47 | 49.6 | 2.4 | 1 | 47 | 48.6 |
| 46 | 51.6 | 2.4 | 0 | 46 | 50.6 | 2.4 | 1 | 46 | 49.6 |
| 45 | 52.6 | 2.4 | 0 | 45 | 51.6 | 2.4 | 1 | 45 | 50.6 |
| 44 | 53.6 | 2.4 | 0 | 44 | 52.6 | 2.4 | 1 | 44 | 51.6 |
| 43 | 54.6 | 2.4 | 0 | 43 | 53.6 | 2.4 | 1 | 43 | 52.6 |
| 42 | 55.6 | 2.4 | 0 | 42 | 54.6 | 2.4 | 1 | 42 | 53.6 |
| 41 | 56.6 | 2.4 | 0 | 41 | 55.6 | 2.4 | 1 | 41 | 54.6 |
| 40 | 57.6 | 2.4 | 0 | 40 | 56.6 | 2.4 | 1 | 40 | 55.6 |
| 39 | 58.6 | 2.4 | 0 | 39 | 57.6 | 2.4 | 1 | 39 | 56.6 |
| 38 | 59.6 | 2.4 | 0 | 38 | 58.6 | 2.4 | 1 | 38 | 57.6 |
| 37 | 60.6 | 2.4 | 0 | 37 | 59.6 | 2.4 | 1 | 37 | 58.6 |
| 36 | 61.6 | 2.4 | 0 | 36 | 60.6 | 2.4 | 1 | 36 | 59.6 |
| 35 | 62.6 | 2.4 | 0 | 35 | 61.6 | 2.4 | 1 | 35 | 60.6 |
| 34 | 63.6 | 2.4 | 0 | 34 | 62.6 | 2.4 | 1 | 34 | 61.6 |
| 33 | 64.6 | 2.4 | 0 | 33 | 63.6 | 2.4 | 1 | 33 | 62.6 |
| 32 | 65.6 | 2.4 | 0 | 32 | 64.6 | 2.4 | 1 | 32 | 63.6 |
| 31 | 66.6 | 2.4 | 0 | 31 | 65.6 | 2.4 | 1 | 31 | 64.6 |
| 30 | 67.6 | 2.4 | 0 | 30 | 66.6 | 2.4 | 1 | 30 | 65.6 |
| 60 | 37.4 | 2.6 | 0 | 60 | 36.4 | 2.6 | 1 | 60 | 35.4 |
| 59 | 38.4 | 2.6 | 0 | 59 | 37.4 | 2.6 | 1 | 59 | 36.4 |
| 58 | 39.4 | 2.6 | 0 | 58 | 38.4 | 2.6 | 1 | 58 | 37.4 |
| 57 | 40.4 | 2.6 | 0 | 57 | 39.4 | 2.6 | 1 | 57 | 38.4 |
| 56 | 41.4 | 2.6 | 0 | 56 | 40.4 | 2.6 | 1 | 56 | 39.4 |
| 55 | 42.4 | 2.6 | 0 | 55 | 41.4 | 2.6 | 1 | 55 | 40.4 |
| 54 | 43.4 | 2.6 | 0 | 54 | 42.4 | 2.6 | 1 | 54 | 41.4 |
| 53 | 44.4 | 2.6 | 0 | 53 | 43.4 | 2.6 | 1 | 53 | 42.4 |
| 52 | 45.4 | 2.6 | 0 | 52 | 44.4 | 2.6 | 1 | 52 | 43.4 |
| 51 | 46.4 | 2.6 | 0 | 51 | 45.4 | 2.6 | 1 | 51 | 44.4 |
| 50 | 47.4 | 2.6 | 0 | 50 | 46.4 | 2.6 | 1 | 50 | 45.4 |
| 49 | 48.4 | 2.6 | 0 | 49 | 47.4 | 2.6 | 1 | 49 | 46.4 |
| 48 | 49.4 | 2.6 | 0 | 48 | 48.4 | 2.6 | 1 | 48 | 47.4 |
| 47 | 50.4 | 2.6 | 0 | 47 | 49.4 | 2.6 | 1 | 47 | 48.4 |
| 46 | 51.4 | 2.6 | 0 | 46 | 50.4 | 2.6 | 1 | 46 | 49.4 |
| 45 | 52.4 | 2.6 | 0 | 45 | 51.4 | 2.6 | 1 | 45 | 50.4 |
| 44 | 53.4 | 2.6 | 0 | 44 | 52.4 | 2.6 | 1 | 44 | 51.4 |
| 43 | 54.4 | 2.6 | 0 | 43 | 53.4 | 2.6 | 1 | 43 | 52.4 |
| 42 | 55.4 | 2.6 | 0 | 42 | 54.4 | 2.6 | 1 | 42 | 53.4 |
| 41 | 56.4 | 2.6 | 0 | 41 | 55.4 | 2.6 | 1 | 41 | 54.4 |
| 40 | 57.4 | 2.6 | 0 | 40 | 56.4 | 2.6 | 1 | 40 | 55.4 |
| 39 | 58.4 | 2.6 | 0 | 39 | 57.4 | 2.6 | 1 | 39 | 56.4 |
| 38 | 59.4 | 2.6 | 0 | 38 | 58.4 | 2.6 | 1 | 38 | 57.4 |
| 37 | 60.4 | 2.6 | 0 | 37 | 59.4 | 2.6 | 1 | 37 | 58.4 |
| 36 | 61.4 | 2.6 | 0 | 36 | 60.4 | 2.6 | 1 | 36 | 59.4 |
| 35 | 62.4 | 2.6 | 0 | 35 | 61.4 | 2.6 | 1 | 35 | 60.4 |
| 34 | 63.4 | 2.6 | 0 | 34 | 62.4 | 2.6 | 1 | 34 | 61.4 |
| 33 | 64.4 | 2.6 | 0 | 33 | 63.4 | 2.6 | 1 | 33 | 62.4 |
| 32 | 65.4 | 2.6 | 0 | 32 | 64.4 | 2.6 | 1 | 32 | 63.4 |
| 31 | 66.4 | 2.6 | 0 | 31 | 65.4 | 2.6 | 1 | 31 | 64.4 |
| 30 | 67.4 | 2.6 | 0 | 30 | 66.4 | 2.6 | 1 | 30 | 65.4 |
| 60 | 37.2 | 2.8 | 0 | 60 | 36.2 | 2.8 | 1 | 60 | 35.2 |
| 59 | 38.2 | 2.8 | 0 | 59 | 37.2 | 2.8 | 1 | 59 | 36.2 |
| 58 | 39.2 | 2.8 | 0 | 58 | 38.2 | 2.8 | 1 | 58 | 37.2 |
| 57 | 40.2 | 2.8 | 0 | 57 | 39.2 | 2.8 | 1 | 57 | 38.2 |
| 56 | 41.2 | 2.8 | 0 | 56 | 40.2 | 2.8 | 1 | 56 | 39.2 |
| 55 | 42.2 | 2.8 | 0 | 55 | 41.2 | 2.8 | 1 | 55 | 40.2 |
| 54 | 43.2 | 2.8 | 0 | 54 | 42.2 | 2.8 | 1 | 54 | 41.2 |
| 53 | 44.2 | 2.8 | 0 | 53 | 43.2 | 2.8 | 1 | 53 | 42.2 |
| 52 | 45.2 | 2.8 | 0 | 52 | 44.2 | 2.8 | 1 | 52 | 43.2 |
| 51 | 46.2 | 2.8 | 0 | 51 | 45.2 | 2.8 | 1 | 51 | 44.2 |
| 50 | 47.2 | 2.8 | 0 | 50 | 46.2 | 2.8 | 1 | 50 | 45.2 |
| 49 | 48.2 | 2.8 | 0 | 49 | 47.2 | 2.8 | 1 | 49 | 46.2 |
| 48 | 49.2 | 2.8 | 0 | 48 | 48.2 | 2.8 | 1 | 48 | 47.2 |
| 47 | 50.2 | 2.8 | 0 | 47 | 49.2 | 2.8 | 1 | 47 | 48.2 |
| 46 | 51.2 | 2.8 | 0 | 46 | 50.2 | 2.8 | 1 | 46 | 49.2 |
| 45 | 52.2 | 2.8 | 0 | 45 | 51.2 | 2.8 | 1 | 45 | 50.2 |
| 44 | 53.2 | 2.8 | 0 | 44 | 52.2 | 2.8 | 1 | 44 | 51.2 |
| 43 | 54.2 | 2.8 | 0 | 43 | 53.2 | 2.8 | 1 | 43 | 52.2 |
| 42 | 55.2 | 2.8 | 0 | 42 | 54.2 | 2.8 | 1 | 42 | 53.2 |
| 41 | 56.2 | 2.8 | 0 | 41 | 55.2 | 2.8 | 1 | 41 | 54.2 |
| 40 | 57.2 | 2.8 | 0 | 40 | 56.2 | 2.8 | 1 | 40 | 55.2 |
| 39 | 58.2 | 2.8 | 0 | 39 | 57.2 | 2.8 | 1 | 39 | 56.2 |
| 38 | 59.2 | 2.8 | 0 | 38 | 58.2 | 2.8 | 1 | 38 | 57.2 |
| 37 | 60.2 | 2.8 | 0 | 37 | 59.2 | 2.8 | 1 | 37 | 58.2 |
| 36 | 61.2 | 2.8 | 0 | 36 | 60.2 | 2.8 | 1 | 36 | 59.2 |
| 35 | 62.2 | 2.8 | 0 | 35 | 61.2 | 2.8 | 1 | 35 | 60.2 |
| 34 | 63.2 | 2.8 | 0 | 34 | 62.2 | 2.8 | 1 | 34 | 61.2 |
| 33 | 64.2 | 2.8 | 0 | 33 | 63.2 | 2.8 | 1 | 33 | 62.2 |
| 32 | 65.2 | 2.8 | 0 | 32 | 64.2 | 2.8 | 1 | 32 | 63.2 |
| 31 | 66.2 | 2.8 | 0 | 31 | 65.2 | 2.8 | 1 | 31 | 64.2 |
| 30 | 67.2 | 2.8 | 0 | 30 | 66.2 | 2.8 | 1 | 30 | 65.2 |
| 60 | 37 | 3 | 0 | 60 | 36 | 3 | 1 | 60 | 35 |
| 59 | 38 | 3 | 0 | 59 | 37 | 3 | 1 | 59 | 36 |
| 58 | 39 | 3 | 0 | 58 | 38 | 3 | 1 | 58 | 37 |
| 57 | 40 | 3 | 0 | 57 | 39 | 3 | 1 | 57 | 38 |
| 56 | 41 | 3 | 0 | 56 | 40 | 3 | 1 | 56 | 39 |
| 55 | 42 | 3 | 0 | 55 | 41 | 3 | 1 | 55 | 40 |
| 54 | 43 | 3 | 0 | 54 | 42 | 3 | 1 | 54 | 41 |
| 53 | 44 | 3 | 0 | 53 | 43 | 3 | 1 | 53 | 42 |
| 52 | 45 | 3 | 0 | 52 | 44 | 3 | 1 | 52 | 43 |
| 51 | 46 | 3 | 0 | 51 | 45 | 3 | 1 | 51 | 44 |
| 50 | 47 | 3 | 0 | 50 | 46 | 3 | 1 | 50 | 45 |
| 49 | 48 | 3 | 0 | 49 | 47 | 3 | 1 | 49 | 46 |
| 48 | 49 | 3 | 0 | 48 | 48 | 3 | 1 | 48 | 47 |
| 47 | 50 | 3 | 0 | 47 | 49 | 3 | 1 | 47 | 48 |
| 46 | 51 | 3 | 0 | 46 | 50 | 3 | 1 | 46 | 49 |
| 45 | 52 | 3 | 0 | 45 | 51 | 3 | 1 | 45 | 50 |
| 44 | 53 | 3 | 0 | 44 | 52 | 3 | 1 | 44 | 51 |
| 43 | 54 | 3 | 0 | 43 | 53 | 3 | 1 | 43 | 52 |
| 42 | 55 | 3 | 0 | 42 | 54 | 3 | 1 | 42 | 53 |
| 41 | 56 | 3 | 0 | 41 | 55 | 3 | 1 | 41 | 54 |
| 40 | 57 | 3 | 0 | 40 | 56 | 3 | 1 | 40 | 55 |
| 39 | 58 | 3 | 0 | 39 | 57 | 3 | 1 | 39 | 56 |
| 38 | 59 | 3 | 0 | 38 | 58 | 3 | 1 | 38 | 57 |
| 37 | 60 | 3 | 0 | 37 | 59 | 3 | 1 | 37 | 58 |
| 36 | 61 | 3 | 0 | 36 | 60 | 3 | 1 | 36 | 59 |
| 35 | 62 | 3 | 0 | 35 | 61 | 3 | 1 | 35 | 60 |
| 34 | 63 | 3 | 0 | 34 | 62 | 3 | 1 | 34 | 61 |
| 33 | 64 | 3 | 0 | 33 | 63 | 3 | 1 | 33 | 62 |
| 32 | 65 | 3 | 0 | 32 | 64 | 3 | 1 | 32 | 63 |
| 31 | 66 | 3 | 0 | 31 | 65 | 3 | 1 | 31 | 64 |
| 30 | 67 | 3 | 0 | 30 | 66 | 3 | 1 | 30 | 65 |
| 60 | 35 | 1 | 4 | 60 | 34 | 1 | 5 | 60 | 33 |
| 59 | 36 | 1 | 4 | 59 | 35 | 1 | 5 | 59 | 34 |
| 58 | 37 | 1 | 4 | 58 | 36 | 1 | 5 | 58 | 35 |
| 57 | 38 | 1 | 4 | 57 | 37 | 1 | 5 | 57 | 36 |
| 56 | 39 | 1 | 4 | 56 | 38 | 1 | 5 | 56 | 37 |
| 55 | 40 | 1 | 4 | 55 | 39 | 1 | 5 | 55 | 38 |
| 54 | 41 | 1 | 4 | 54 | 40 | 1 | 5 | 54 | 39 |
| 53 | 42 | 1 | 4 | 53 | 41 | 1 | 5 | 53 | 40 |
| 52 | 43 | 1 | 4 | 52 | 42 | 1 | 5 | 52 | 41 |
| 51 | 44 | 1 | 4 | 51 | 43 | 1 | 5 | 51 | 42 |
| 50 | 45 | 1 | 4 | 50 | 44 | 1 | 5 | 50 | 43 |
| 49 | 46 | 1 | 4 | 49 | 45 | 1 | 5 | 49 | 44 |
| 48 | 47 | 1 | 4 | 48 | 46 | 1 | 5 | 48 | 45 |
| 47 | 48 | 1 | 4 | 47 | 47 | 1 | 5 | 47 | 46 |
| 46 | 49 | 1 | 4 | 46 | 48 | 1 | 5 | 46 | 47 |
| 45 | 50 | 1 | 4 | 45 | 49 | 1 | 5 | 45 | 48 |
| 44 | 51 | 1 | 4 | 44 | 50 | 1 | 5 | 44 | 49 |
| 43 | 52 | 1 | 4 | 43 | 51 | 1 | 5 | 43 | 50 |
| 42 | 53 | 1 | 4 | 42 | 52 | 1 | 5 | 42 | 51 |
| 41 | 54 | 1 | 4 | 41 | 53 | 1 | 5 | 41 | 52 |
| 40 | 55 | 1 | 4 | 40 | 54 | 1 | 5 | 40 | 53 |
| 39 | 56 | 1 | 4 | 39 | 55 | 1 | 5 | 39 | 54 |
| 38 | 57 | 1 | 4 | 38 | 56 | 1 | 5 | 38 | 55 |
| 37 | 58 | 1 | 4 | 37 | 57 | 1 | 5 | 37 | 56 |
| 36 | 59 | 1 | 4 | 36 | 58 | 1 | 5 | 36 | 57 |
| 35 | 60 | 1 | 4 | 35 | 59 | 1 | 5 | 35 | 58 |
| 34 | 61 | 1 | 4 | 34 | 60 | 1 | 5 | 34 | 59 |
| 33 | 62 | 1 | 4 | 33 | 61 | 1 | 5 | 33 | 60 |
| 32 | 63 | 1 | 4 | 32 | 62 | 1 | 5 | 32 | 61 |
| 31 | 64 | 1 | 4 | 31 | 63 | 1 | 5 | 31 | 62 |
| 30 | 65 | 1 | 4 | 30 | 64 | 1 | 5 | 30 | 63 |
| 60 | 34.8 | 1.2 | 4 | 60 | 33.8 | 1.2 | 5 | 60 | 32.8 |
| 59 | 35.8 | 1.2 | 4 | 59 | 34.8 | 1.2 | 5 | 59 | 33.8 |
| 58 | 36.8 | 1.2 | 4 | 58 | 35.8 | 1.2 | 5 | 58 | 34.8 |
| 57 | 37.8 | 1.2 | 4 | 57 | 36.8 | 1.2 | 5 | 57 | 35.8 |
| 56 | 38.8 | 1.2 | 4 | 56 | 37.8 | 1.2 | 5 | 56 | 36.8 |
| 55 | 39.8 | 1.2 | 4 | 55 | 38.8 | 1.2 | 5 | 55 | 37.8 |
| 54 | 40.8 | 1.2 | 4 | 54 | 39.8 | 1.2 | 5 | 54 | 38.8 |
| 53 | 41.8 | 1.2 | 4 | 53 | 40.8 | 1.2 | 5 | 53 | 39.8 |
| 52 | 42.8 | 1.2 | 4 | 52 | 41.8 | 1.2 | 5 | 52 | 40.8 |
| 51 | 43.8 | 1.2 | 4 | 51 | 42.8 | 1.2 | 5 | 51 | 41.8 |
| 50 | 44.8 | 1.2 | 4 | 50 | 43.8 | 1.2 | 5 | 50 | 42.8 |
| 49 | 45.8 | 1.2 | 4 | 49 | 44.8 | 1.2 | 5 | 49 | 43.8 |
| 48 | 46.8 | 1.2 | 4 | 48 | 45.8 | 1.2 | 5 | 48 | 44.8 |
| 47 | 47.8 | 1.2 | 4 | 47 | 46.8 | 1.2 | 5 | 47 | 45.8 |
| 46 | 48.8 | 1.2 | 4 | 46 | 47.8 | 1.2 | 5 | 46 | 46.8 |
| 45 | 49.8 | 1.2 | 4 | 45 | 48.8 | 1.2 | 5 | 45 | 47.8 |
| 44 | 50.8 | 1.2 | 4 | 44 | 49.8 | 1.2 | 5 | 44 | 48.8 |
| 43 | 51.8 | 1.2 | 4 | 43 | 50.8 | 1.2 | 5 | 43 | 49.8 |
| 42 | 52.8 | 1.2 | 4 | 42 | 51.8 | 1.2 | 5 | 42 | 50.8 |
| 41 | 53.8 | 1.2 | 4 | 41 | 52.8 | 1.2 | 5 | 41 | 51.8 |
| 40 | 54.8 | 1.2 | 4 | 40 | 53.8 | 1.2 | 5 | 40 | 52.8 |
| 39 | 55.8 | 1.2 | 4 | 39 | 54.8 | 1.2 | 5 | 39 | 53.8 |
| 38 | 56.8 | 1.2 | 4 | 38 | 55.8 | 1.2 | 5 | 38 | 54.8 |
| 37 | 57.8 | 1.2 | 4 | 37 | 56.8 | 1.2 | 5 | 37 | 55.8 |
| 36 | 58.8 | 1.2 | 4 | 36 | 57.8 | 1.2 | 5 | 36 | 56.8 |
| 35 | 59.8 | 1.2 | 4 | 35 | 58.8 | 1.2 | 5 | 35 | 57.8 |
| 34 | 60.8 | 1.2 | 4 | 34 | 59.8 | 1.2 | 5 | 34 | 58.8 |
| 33 | 61.8 | 1.2 | 4 | 33 | 60.8 | 1.2 | 5 | 33 | 59.8 |
| 32 | 62.8 | 1.2 | 4 | 32 | 61.8 | 1.2 | 5 | 32 | 60.8 |
| 31 | 63.8 | 1.2 | 4 | 31 | 62.8 | 1.2 | 5 | 31 | 61.8 |
| 30 | 64.8 | 1.2 | 4 | 30 | 63.8 | 1.2 | 5 | 30 | 62.8 |
| 60 | 34.6 | 1.4 | 4 | 60 | 33.6 | 1.4 | 5 | 60 | 32.6 |
| 59 | 35.6 | 1.4 | 4 | 59 | 34.6 | 1.4 | 5 | 59 | 33.6 |
| 58 | 36.6 | 1.4 | 4 | 58 | 35.6 | 1.4 | 5 | 58 | 34.6 |
| 57 | 37.6 | 1.4 | 4 | 57 | 36.6 | 1.4 | 5 | 57 | 35.6 |
| 56 | 38.6 | 1.4 | 4 | 56 | 37.6 | 1.4 | 5 | 56 | 36.6 |
| 55 | 39.6 | 1.4 | 4 | 55 | 38.6 | 1.4 | 5 | 55 | 37.6 |
| 54 | 40.6 | 1.4 | 4 | 54 | 39.6 | 1.4 | 5 | 54 | 38.6 |
| 53 | 41.6 | 1.4 | 4 | 53 | 40.6 | 1.4 | 5 | 53 | 39.6 |
| 52 | 42.6 | 1.4 | 4 | 52 | 41.6 | 1.4 | 5 | 52 | 40.6 |
| 51 | 43.6 | 1.4 | 4 | 51 | 42.6 | 1.4 | 5 | 51 | 41.6 |
| 50 | 44.6 | 1.4 | 4 | 50 | 43.6 | 1.4 | 5 | 50 | 42.6 |
| 49 | 45.6 | 1.4 | 4 | 49 | 44.6 | 1.4 | 5 | 49 | 43.6 |
| 48 | 46.6 | 1.4 | 4 | 48 | 45.6 | 1.4 | 5 | 48 | 44.6 |
| 47 | 47.6 | 1.4 | 4 | 47 | 46.6 | 1.4 | 5 | 47 | 45.6 |
| 46 | 48.6 | 1.4 | 4 | 46 | 47.6 | 1.4 | 5 | 46 | 46.6 |
| 45 | 49.6 | 1.4 | 4 | 45 | 48.6 | 1.4 | 5 | 45 | 47.6 |
| 44 | 50.6 | 1.4 | 4 | 44 | 49.6 | 1.4 | 5 | 44 | 48.6 |
| 43 | 51.6 | 1.4 | 4 | 43 | 50.6 | 1.4 | 5 | 43 | 49.6 |
| 42 | 52.6 | 1.4 | 4 | 42 | 51.6 | 1.4 | 5 | 42 | 50.6 |
| 41 | 53.6 | 1.4 | 4 | 41 | 52.6 | 1.4 | 5 | 41 | 51.6 |
| 40 | 54.6 | 1.4 | 4 | 40 | 53.6 | 1.4 | 5 | 40 | 52.6 |
| 39 | 55.6 | 1.4 | 4 | 39 | 54.6 | 1.4 | 5 | 39 | 53.6 |
| 38 | 56.6 | 1.4 | 4 | 38 | 55.6 | 1.4 | 5 | 38 | 54.6 |
| 37 | 57.6 | 1.4 | 4 | 37 | 56.6 | 1.4 | 5 | 37 | 55.6 |
| 36 | 58.6 | 1.4 | 4 | 36 | 57.6 | 1.4 | 5 | 36 | 56.6 |
| 35 | 59.6 | 1.4 | 4 | 35 | 58.6 | 1.4 | 5 | 35 | 57.6 |
| 34 | 60.6 | 1.4 | 4 | 34 | 59.6 | 1.4 | 5 | 34 | 58.6 |
| 33 | 61.6 | 1.4 | 4 | 33 | 60.6 | 1.4 | 5 | 33 | 59.6 |
| 32 | 62.6 | 1.4 | 4 | 32 | 61.6 | 1.4 | 5 | 32 | 60.6 |
| 31 | 63.6 | 1.4 | 4 | 31 | 62.6 | 1.4 | 5 | 31 | 61.6 |
| 30 | 64.6 | 1.4 | 4 | 30 | 63.6 | 1.4 | 5 | 30 | 62.6 |
| 60 | 34.4 | 1.6 | 4 | 60 | 33.4 | 1.6 | 5 | 60 | 32.4 |
| 59 | 35.4 | 1.6 | 4 | 59 | 34.4 | 1.6 | 5 | 59 | 33.4 |
| 58 | 36.4 | 1.6 | 4 | 58 | 35.4 | 1.6 | 5 | 58 | 34.4 |
| 57 | 37.4 | 1.6 | 4 | 57 | 36.4 | 1.6 | 5 | 57 | 35.4 |
| 56 | 38.4 | 1.6 | 4 | 56 | 37.4 | 1.6 | 5 | 56 | 36.4 |
| 55 | 39.4 | 1.6 | 4 | 55 | 38.4 | 1.6 | 5 | 55 | 37.4 |
| 54 | 40.4 | 1.6 | 4 | 54 | 39.4 | 1.6 | 5 | 54 | 38.4 |
| 53 | 41.4 | 1.6 | 4 | 53 | 40.4 | 1.6 | 5 | 53 | 39.4 |
| 52 | 42.4 | 1.6 | 4 | 52 | 41.4 | 1.6 | 5 | 52 | 40.4 |
| 51 | 43.4 | 1.6 | 4 | 51 | 42.4 | 1.6 | 5 | 51 | 41.4 |
| 50 | 44.4 | 1.6 | 4 | 50 | 43.4 | 1.6 | 5 | 50 | 42.4 |
| 49 | 45.4 | 1.6 | 4 | 49 | 44.4 | 1.6 | 5 | 49 | 43.4 |
| 48 | 46.4 | 1.6 | 4 | 48 | 45.4 | 1.6 | 5 | 48 | 44.4 |
| 47 | 47.4 | 1.6 | 4 | 47 | 46.4 | 1.6 | 5 | 47 | 45.4 |
| 46 | 48.4 | 1.6 | 4 | 46 | 47.4 | 1.6 | 5 | 46 | 46.4 |
| 45 | 49.4 | 1.6 | 4 | 45 | 48.4 | 1.6 | 5 | 45 | 47.4 |
| 44 | 50.4 | 1.6 | 4 | 44 | 49.4 | 1.6 | 5 | 44 | 48.4 |
| 43 | 51.4 | 1.6 | 4 | 43 | 50.4 | 1.6 | 5 | 43 | 49.4 |
| 42 | 52.4 | 1.6 | 4 | 42 | 51.4 | 1.6 | 5 | 42 | 50.4 |
| 41 | 53.4 | 1.6 | 4 | 41 | 52.4 | 1.6 | 5 | 41 | 51.4 |
| 40 | 54.4 | 1.6 | 4 | 40 | 53.4 | 1.6 | 5 | 40 | 52.4 |
| 39 | 55.4 | 1.6 | 4 | 39 | 54.4 | 1.6 | 5 | 39 | 53.4 |
| 38 | 56.4 | 1.6 | 4 | 38 | 55.4 | 1.6 | 5 | 38 | 54.4 |
| 37 | 57.4 | 1.6 | 4 | 37 | 56.4 | 1.6 | 5 | 37 | 55.4 |
| 36 | 58.4 | 1.6 | 4 | 36 | 57.4 | 1.6 | 5 | 36 | 56.4 |
| 35 | 59.4 | 1.6 | 4 | 35 | 58.4 | 1.6 | 5 | 35 | 57.4 |
| 34 | 60.4 | 1.6 | 4 | 34 | 59.4 | 1.6 | 5 | 34 | 58.4 |
| 33 | 61.4 | 1.6 | 4 | 33 | 60.4 | 1.6 | 5 | 33 | 59.4 |
| 32 | 62.4 | 1.6 | 4 | 32 | 61.4 | 1.6 | 5 | 32 | 60.4 |
| 31 | 63.4 | 1.6 | 4 | 31 | 62.4 | 1.6 | 5 | 31 | 61.4 |
| 30 | 64.4 | 1.6 | 4 | 30 | 63.4 | 1.6 | 5 | 30 | 62.4 |
| 60 | 34.2 | 1.8 | 4 | 60 | 33.2 | 1.8 | 5 | 60 | 32.2 |
| 59 | 35.2 | 1.8 | 4 | 59 | 34.2 | 1.8 | 5 | 59 | 33.2 |
| 58 | 36.2 | 1.8 | 4 | 58 | 35.2 | 1.8 | 5 | 58 | 34.2 |
| 57 | 37.2 | 1.8 | 4 | 57 | 36.2 | 1.8 | 5 | 57 | 35.2 |
| 56 | 38.2 | 1.8 | 4 | 56 | 37.2 | 1.8 | 5 | 56 | 36.2 |
| 55 | 39.2 | 1.8 | 4 | 55 | 38.2 | 1.8 | 5 | 55 | 37.2 |
| 54 | 40.2 | 1.8 | 4 | 54 | 39.2 | 1.8 | 5 | 54 | 38.2 |
| 53 | 41.2 | 1.8 | 4 | 53 | 40.2 | 1.8 | 5 | 53 | 39.2 |
| 52 | 42.2 | 1.8 | 4 | 52 | 41.2 | 1.8 | 5 | 52 | 40.2 |
| 51 | 43.2 | 1.8 | 4 | 51 | 42.2 | 1.8 | 5 | 51 | 41.2 |
| 50 | 44.2 | 1.8 | 4 | 50 | 43.2 | 1.8 | 5 | 50 | 42.2 |
| 49 | 45.2 | 1.8 | 4 | 49 | 44.2 | 1.8 | 5 | 49 | 43.2 |
| 48 | 46.2 | 1.8 | 4 | 48 | 45.2 | 1.8 | 5 | 48 | 44.2 |
| 47 | 47.2 | 1.8 | 4 | 47 | 46.2 | 1.8 | 5 | 47 | 45.2 |
| 46 | 48.2 | 1.8 | 4 | 46 | 47.2 | 1.8 | 5 | 46 | 46.2 |
| 45 | 49.2 | 1.8 | 4 | 45 | 48.2 | 1.8 | 5 | 45 | 47.2 |
| 44 | 50.2 | 1.8 | 4 | 44 | 49.2 | 1.8 | 5 | 44 | 48.2 |
| 43 | 51.2 | 1.8 | 4 | 43 | 50.2 | 1.8 | 5 | 43 | 49.2 |
| 42 | 52.2 | 1.8 | 4 | 42 | 51.2 | 1.8 | 5 | 42 | 50.2 |
| 41 | 53.2 | 1.8 | 4 | 41 | 52.2 | 1.8 | 5 | 41 | 51.2 |
| 40 | 54.2 | 1.8 | 4 | 40 | 53.2 | 1.8 | 5 | 40 | 52.2 |
| 39 | 55.2 | 1.8 | 4 | 39 | 54.2 | 1.8 | 5 | 39 | 53.2 |
| 38 | 56.2 | 1.8 | 4 | 38 | 55.2 | 1.8 | 5 | 38 | 54.2 |
| 37 | 57.2 | 1.8 | 4 | 37 | 56.2 | 1.8 | 5 | 37 | 55.2 |
| 36 | 58.2 | 1.8 | 4 | 36 | 57.2 | 1.8 | 5 | 36 | 56.2 |
| 35 | 59.2 | 1.8 | 4 | 35 | 58.2 | 1.8 | 5 | 35 | 57.2 |
| 34 | 60.2 | 1.8 | 4 | 34 | 59.2 | 1.8 | 5 | 34 | 58.2 |
| 33 | 61.2 | 1.8 | 4 | 33 | 60.2 | 1.8 | 5 | 33 | 59.2 |
| 32 | 62.2 | 1.8 | 4 | 32 | 61.2 | 1.8 | 5 | 32 | 60.2 |
| 31 | 63.2 | 1.8 | 4 | 31 | 62.2 | 1.8 | 5 | 31 | 61.2 |
| 30 | 64.2 | 1.8 | 4 | 30 | 63.2 | 1.8 | 5 | 30 | 62.2 |
| 60 | 34 | 2 | 4 | 60 | 33 | 2 | 5 | 60 | 32 |
| 59 | 35 | 2 | 4 | 59 | 34 | 2 | 5 | 59 | 33 |
| 58 | 36 | 2 | 4 | 58 | 35 | 2 | 5 | 58 | 34 |
| 57 | 37 | 2 | 4 | 57 | 36 | 2 | 5 | 57 | 35 |
| 56 | 38 | 2 | 4 | 56 | 37 | 2 | 5 | 56 | 36 |
| 55 | 39 | 2 | 4 | 55 | 38 | 2 | 5 | 55 | 37 |
| 54 | 40 | 2 | 4 | 54 | 39 | 2 | 5 | 54 | 38 |
| 53 | 41 | 2 | 4 | 53 | 40 | 2 | 5 | 53 | 39 |
| 52 | 42 | 2 | 4 | 52 | 41 | 2 | 5 | 52 | 40 |
| 51 | 43 | 2 | 4 | 51 | 42 | 2 | 5 | 51 | 41 |
| 50 | 44 | 2 | 4 | 50 | 43 | 2 | 5 | 50 | 42 |
| 49 | 45 | 2 | 4 | 49 | 44 | 2 | 5 | 49 | 43 |
| 48 | 46 | 2 | 4 | 48 | 45 | 2 | 5 | 48 | 44 |
| 47 | 47 | 2 | 4 | 47 | 46 | 2 | 5 | 47 | 45 |
| 46 | 48 | 2 | 4 | 46 | 47 | 2 | 5 | 46 | 46 |
| 45 | 49 | 2 | 4 | 45 | 48 | 2 | 5 | 45 | 47 |
| 44 | 50 | 2 | 4 | 44 | 49 | 2 | 5 | 44 | 48 |
| 43 | 51 | 2 | 4 | 43 | 50 | 2 | 5 | 43 | 49 |
| 42 | 52 | 2 | 4 | 42 | 51 | 2 | 5 | 42 | 50 |
| 41 | 53 | 2 | 4 | 41 | 52 | 2 | 5 | 41 | 51 |
| 40 | 54 | 2 | 4 | 40 | 53 | 2 | 5 | 40 | 52 |
| 39 | 55 | 2 | 4 | 39 | 54 | 2 | 5 | 39 | 53 |
| 38 | 56 | 2 | 4 | 38 | 55 | 2 | 5 | 38 | 54 |
| 37 | 57 | 2 | 4 | 37 | 56 | 2 | 5 | 37 | 55 |
| 36 | 58 | 2 | 4 | 36 | 57 | 2 | 5 | 36 | 56 |
| 35 | 59 | 2 | 4 | 35 | 58 | 2 | 5 | 35 | 57 |
| 34 | 60 | 2 | 4 | 34 | 59 | 2 | 5 | 34 | 58 |
| 33 | 61 | 2 | 4 | 33 | 60 | 2 | 5 | 33 | 59 |
| 32 | 62 | 2 | 4 | 32 | 61 | 2 | 5 | 32 | 60 |
| 31 | 63 | 2 | 4 | 31 | 62 | 2 | 5 | 31 | 61 |
| 30 | 64 | 2 | 4 | 30 | 63 | 2 | 5 | 30 | 62 |
| 60 | 33.8 | 2.2 | 4 | 60 | 32.8 | 2.2 | 5 | 60 | 31.8 |
| 59 | 34.8 | 2.2 | 4 | 59 | 33.8 | 2.2 | 5 | 59 | 32.8 |
| 58 | 35.8 | 2.2 | 4 | 58 | 34.8 | 2.2 | 5 | 58 | 33.8 |
| 57 | 36.8 | 2.2 | 4 | 57 | 35.8 | 2.2 | 5 | 57 | 34.8 |
| 56 | 37.8 | 2.2 | 4 | 56 | 36.8 | 2.2 | 5 | 56 | 35.8 |
| 55 | 38.8 | 2.2 | 4 | 55 | 37.8 | 2.2 | 5 | 55 | 36.8 |
| 54 | 39.8 | 2.2 | 4 | 54 | 38.8 | 2.2 | 5 | 54 | 37.8 |
| 53 | 40.8 | 2.2 | 4 | 53 | 39.8 | 2.2 | 5 | 53 | 38.8 |
| 52 | 41.8 | 2.2 | 4 | 52 | 40.8 | 2.2 | 5 | 52 | 39.8 |
| 51 | 42.8 | 2.2 | 4 | 51 | 41.8 | 2.2 | 5 | 51 | 40.8 |
| 50 | 43.8 | 2.2 | 4 | 50 | 42.8 | 2.2 | 5 | 50 | 41.8 |
| 49 | 44.8 | 2.2 | 4 | 49 | 43.8 | 2.2 | 5 | 49 | 42.8 |
| 48 | 45.8 | 2.2 | 4 | 48 | 44.8 | 2.2 | 5 | 48 | 43.8 |
| 47 | 46.8 | 2.2 | 4 | 47 | 45.8 | 2.2 | 5 | 47 | 44.8 |
| 46 | 47.8 | 2.2 | 4 | 46 | 46.8 | 2.2 | 5 | 46 | 45.8 |
| 45 | 48.8 | 2.2 | 4 | 45 | 47.8 | 2.2 | 5 | 45 | 46.8 |
| 44 | 49.8 | 2.2 | 4 | 44 | 48.8 | 2.2 | 5 | 44 | 47.8 |
| 43 | 50.8 | 2.2 | 4 | 43 | 49.8 | 2.2 | 5 | 43 | 48.8 |
| 42 | 51.8 | 2.2 | 4 | 42 | 50.8 | 2.2 | 5 | 42 | 49.8 |
| 41 | 52.8 | 2.2 | 4 | 41 | 51.8 | 2.2 | 5 | 41 | 50.8 |
| 40 | 53.8 | 2.2 | 4 | 40 | 52.8 | 2.2 | 5 | 40 | 51.8 |
| 39 | 54.8 | 2.2 | 4 | 39 | 53.8 | 2.2 | 5 | 39 | 52.8 |
| 38 | 55.8 | 2.2 | 4 | 38 | 54.8 | 2.2 | 5 | 38 | 53.8 |
| 37 | 56.8 | 2.2 | 4 | 37 | 55.8 | 2.2 | 5 | 37 | 54.8 |
| 36 | 57.8 | 2.2 | 4 | 36 | 56.8 | 2.2 | 5 | 36 | 55.8 |
| 35 | 58.8 | 2.2 | 4 | 35 | 57.8 | 2.2 | 5 | 35 | 56.8 |
| 34 | 59.8 | 2.2 | 4 | 34 | 58.8 | 2.2 | 5 | 34 | 57.8 |
| 33 | 60.8 | 2.2 | 4 | 33 | 59.8 | 2.2 | 5 | 33 | 58.8 |
| 32 | 61.8 | 2.2 | 4 | 32 | 60.8 | 2.2 | 5 | 32 | 59.8 |
| 31 | 62.8 | 2.2 | 4 | 31 | 61.8 | 2.2 | 5 | 31 | 60.8 |
| 30 | 63.8 | 2.2 | 4 | 30 | 62.8 | 2.2 | 5 | 30 | 61.8 |
| 60 | 33.6 | 2.4 | 4 | 60 | 32.6 | 2.4 | 5 | 60 | 31.6 |
| 59 | 34.6 | 2.4 | 4 | 59 | 33.6 | 2.4 | 5 | 59 | 32.6 |
| 58 | 35.6 | 2.4 | 4 | 58 | 34.6 | 2.4 | 5 | 58 | 33.6 |
| 57 | 36.6 | 2.4 | 4 | 57 | 35.6 | 2.4 | 5 | 57 | 34.6 |
| 56 | 37.6 | 2.4 | 4 | 56 | 36.6 | 2.4 | 5 | 56 | 35.6 |
| 55 | 38.6 | 2.4 | 4 | 55 | 37.6 | 2.4 | 5 | 55 | 36.6 |
| 54 | 39.6 | 2.4 | 4 | 54 | 38.6 | 2.4 | 5 | 54 | 37.6 |
| 53 | 40.6 | 2.4 | 4 | 53 | 39.6 | 2.4 | 5 | 53 | 38.6 |
| 52 | 41.6 | 2.4 | 4 | 52 | 40.6 | 2.4 | 5 | 52 | 39.6 |
| 51 | 42.6 | 2.4 | 4 | 51 | 41.6 | 2.4 | 5 | 51 | 40.6 |
| 50 | 43.6 | 2.4 | 4 | 50 | 42.6 | 2.4 | 5 | 50 | 41.6 |
| 49 | 44.6 | 2.4 | 4 | 49 | 43.6 | 2.4 | 5 | 49 | 42.6 |
| 48 | 45.6 | 2.4 | 4 | 48 | 44.6 | 2.4 | 5 | 48 | 43.6 |
| 47 | 46.6 | 2.4 | 4 | 47 | 45.6 | 2.4 | 5 | 47 | 44.6 |
| 46 | 47.6 | 2.4 | 4 | 46 | 46.6 | 2.4 | 5 | 46 | 45.6 |
| 45 | 48.6 | 2.4 | 4 | 45 | 47.6 | 2.4 | 5 | 45 | 46.6 |
| 44 | 49.6 | 2.4 | 4 | 44 | 48.6 | 2.4 | 5 | 44 | 47.6 |
| 43 | 50.6 | 2.4 | 4 | 43 | 49.6 | 2.4 | 5 | 43 | 48.6 |
| 42 | 51.6 | 2.4 | 4 | 42 | 50.6 | 2.4 | 5 | 42 | 49.6 |
| 41 | 52.6 | 2.4 | 4 | 41 | 51.6 | 2.4 | 5 | 41 | 50.6 |
| 40 | 53.6 | 2.4 | 4 | 40 | 52.6 | 2.4 | 5 | 40 | 51.6 |
| 39 | 54.6 | 2.4 | 4 | 39 | 53.6 | 2.4 | 5 | 39 | 52.6 |
| 38 | 55.6 | 2.4 | 4 | 38 | 54.6 | 2.4 | 5 | 38 | 53.6 |
| 37 | 56.6 | 2.4 | 4 | 37 | 55.6 | 2.4 | 5 | 37 | 54.6 |
| 36 | 57.6 | 2.4 | 4 | 36 | 56.6 | 2.4 | 5 | 36 | 55.6 |
| 35 | 58.6 | 2.4 | 4 | 35 | 57.6 | 2.4 | 5 | 35 | 56.6 |
| 34 | 59.6 | 2.4 | 4 | 34 | 58.6 | 2.4 | 5 | 34 | 57.6 |
| 33 | 60.6 | 2.4 | 4 | 33 | 59.6 | 2.4 | 5 | 33 | 58.6 |
| 32 | 61.6 | 2.4 | 4 | 32 | 60.6 | 2.4 | 5 | 32 | 59.6 |
| 31 | 62.6 | 2.4 | 4 | 31 | 61.6 | 2.4 | 5 | 31 | 60.6 |
| 30 | 63.6 | 2.4 | 4 | 30 | 62.6 | 2.4 | 5 | 30 | 61.6 |
| 60 | 33.4 | 2.6 | 4 | 60 | 32.4 | 2.6 | 5 | 60 | 31.4 |
| 59 | 34.4 | 2.6 | 4 | 59 | 33.4 | 2.6 | 5 | 59 | 32.4 |
| 58 | 35.4 | 2.6 | 4 | 58 | 34.4 | 2.6 | 5 | 58 | 33.4 |
| 57 | 36.4 | 2.6 | 4 | 57 | 35.4 | 2.6 | 5 | 57 | 34.4 |
| 56 | 37.4 | 2.6 | 4 | 56 | 36.4 | 2.6 | 5 | 56 | 35.4 |
| 55 | 38.4 | 2.6 | 4 | 55 | 37.4 | 2.6 | 5 | 55 | 36.4 |
| 54 | 39.4 | 2.6 | 4 | 54 | 38.4 | 2.6 | 5 | 54 | 37.4 |
| 53 | 40.4 | 2.6 | 4 | 53 | 39.4 | 2.6 | 5 | 53 | 38.4 |
| 52 | 41.4 | 2.6 | 4 | 52 | 40.4 | 2.6 | 5 | 52 | 39.4 |
| 51 | 42.4 | 2.6 | 4 | 51 | 41.4 | 2.6 | 5 | 51 | 40.4 |
| 50 | 43.4 | 2.6 | 4 | 50 | 42.4 | 2.6 | 5 | 50 | 41.4 |
| 49 | 44.4 | 2.6 | 4 | 49 | 43.4 | 2.6 | 5 | 49 | 42.4 |
| 48 | 45.4 | 2.6 | 4 | 48 | 44.4 | 2.6 | 5 | 48 | 43.4 |
| 47 | 46.4 | 2.6 | 4 | 47 | 45.4 | 2.6 | 5 | 47 | 44.4 |
| 46 | 47.4 | 2.6 | 4 | 46 | 46.4 | 2.6 | 5 | 46 | 45.4 |
| 45 | 48.4 | 2.6 | 4 | 45 | 47.4 | 2.6 | 5 | 45 | 46.4 |
| 44 | 49.4 | 2.6 | 4 | 44 | 48.4 | 2.6 | 5 | 44 | 47.4 |
| 43 | 50.4 | 2.6 | 4 | 43 | 49.4 | 2.6 | 5 | 43 | 48.4 |
| 42 | 51.4 | 2.6 | 4 | 42 | 50.4 | 2.6 | 5 | 42 | 49.4 |
| 41 | 52.4 | 2.6 | 4 | 41 | 51.4 | 2.6 | 5 | 41 | 50.4 |
| 40 | 53.4 | 2.6 | 4 | 40 | 52.4 | 2.6 | 5 | 40 | 51.4 |
| 39 | 54.4 | 2.6 | 4 | 39 | 53.4 | 2.6 | 5 | 39 | 52.4 |
| 38 | 55.4 | 2.6 | 4 | 38 | 54.4 | 2.6 | 5 | 38 | 53.4 |
| 37 | 56.4 | 2.6 | 4 | 37 | 55.4 | 2.6 | 5 | 37 | 54.4 |
| 36 | 57.4 | 2.6 | 4 | 36 | 56.4 | 2.6 | 5 | 36 | 55.4 |
| 35 | 58.4 | 2.6 | 4 | 35 | 57.4 | 2.6 | 5 | 35 | 56.4 |
| 34 | 59.4 | 2.6 | 4 | 34 | 58.4 | 2.6 | 5 | 34 | 57.4 |
| 33 | 60.4 | 2.6 | 4 | 33 | 59.4 | 2.6 | 5 | 33 | 58.4 |
| 32 | 61.4 | 2.6 | 4 | 32 | 60.4 | 2.6 | 5 | 32 | 59.4 |
| 31 | 62.4 | 2.6 | 4 | 31 | 61.4 | 2.6 | 5 | 31 | 60.4 |
| 30 | 63.4 | 2.6 | 4 | 30 | 62.4 | 2.6 | 5 | 30 | 61.4 |
| 60 | 33.2 | 2.8 | 4 | 60 | 32.2 | 2.8 | 5 | 60 | 31.2 |
| 59 | 34.2 | 2.8 | 4 | 59 | 33.2 | 2.8 | 5 | 59 | 32.2 |
| 58 | 35.2 | 2.8 | 4 | 58 | 34.2 | 2.8 | 5 | 58 | 33.2 |
| 57 | 36.2 | 2.8 | 4 | 57 | 35.2 | 2.8 | 5 | 57 | 34.2 |
| 56 | 37.2 | 2.8 | 4 | 56 | 36.2 | 2.8 | 5 | 56 | 35.2 |
| 55 | 38.2 | 2.8 | 4 | 55 | 37.2 | 2.8 | 5 | 55 | 36.2 |
| 54 | 39.2 | 2.8 | 4 | 54 | 38.2 | 2.8 | 5 | 54 | 37.2 |
| 53 | 40.2 | 2.8 | 4 | 53 | 39.2 | 2.8 | 5 | 53 | 38.2 |
| 52 | 41.2 | 2.8 | 4 | 52 | 40.2 | 2.8 | 5 | 52 | 39.2 |
| 51 | 42.2 | 2.8 | 4 | 51 | 41.2 | 2.8 | 5 | 51 | 40.2 |
| 50 | 43.2 | 2.8 | 4 | 50 | 42.2 | 2.8 | 5 | 50 | 41.2 |
| 49 | 44.2 | 2.8 | 4 | 49 | 43.2 | 2.8 | 5 | 49 | 42.2 |
| 48 | 45.2 | 2.8 | 4 | 48 | 44.2 | 2.8 | 5 | 48 | 43.2 |
| 47 | 46.2 | 2.8 | 4 | 47 | 45.2 | 2.8 | 5 | 47 | 44.2 |
| 46 | 47.2 | 2.8 | 4 | 46 | 46.2 | 2.8 | 5 | 46 | 45.2 |
| 45 | 48.2 | 2.8 | 4 | 45 | 47.2 | 2.8 | 5 | 45 | 46.2 |
| 44 | 49.2 | 2.8 | 4 | 44 | 48.2 | 2.8 | 5 | 44 | 47.2 |
| 43 | 50.2 | 2.8 | 4 | 43 | 49.2 | 2.8 | 5 | 43 | 48.2 |
| 42 | 51.2 | 2.8 | 4 | 42 | 50.2 | 2.8 | 5 | 42 | 49.2 |
| 41 | 52.2 | 2.8 | 4 | 41 | 51.2 | 2.8 | 5 | 41 | 50.2 |
| 40 | 53.2 | 2.8 | 4 | 40 | 52.2 | 2.8 | 5 | 40 | 51.2 |
| 39 | 54.2 | 2.8 | 4 | 39 | 53.2 | 2.8 | 5 | 39 | 52.2 |
| 38 | 55.2 | 2.8 | 4 | 38 | 54.2 | 2.8 | 5 | 38 | 53.2 |
| 37 | 56.2 | 2.8 | 4 | 37 | 55.2 | 2.8 | 5 | 37 | 54.2 |
| 36 | 57.2 | 2.8 | 4 | 36 | 56.2 | 2.8 | 5 | 36 | 55.2 |
| 35 | 58.2 | 2.8 | 4 | 35 | 57.2 | 2.8 | 5 | 35 | 56.2 |
| 34 | 59.2 | 2.8 | 4 | 34 | 58.2 | 2.8 | 5 | 34 | 57.2 |
| 33 | 60.2 | 2.8 | 4 | 33 | 59.2 | 2.8 | 5 | 33 | 58.2 |
| 32 | 61.2 | 2.8 | 4 | 32 | 60.2 | 2.8 | 5 | 32 | 59.2 |
| 31 | 62.2 | 2.8 | 4 | 31 | 61.2 | 2.8 | 5 | 31 | 60.2 |
| 30 | 63.2 | 2.8 | 4 | 30 | 62.2 | 2.8 | 5 | 30 | 61.2 |
| 60 | 33 | 3 | 4 | 60 | 32 | 3 | 5 | 60 | 31 |
| 59 | 34 | 3 | 4 | 59 | 33 | 3 | 5 | 59 | 32 |
| 58 | 35 | 3 | 4 | 58 | 34 | 3 | 5 | 58 | 33 |
| 57 | 36 | 3 | 4 | 57 | 35 | 3 | 5 | 57 | 34 |
| 56 | 37 | 3 | 4 | 56 | 36 | 3 | 5 | 56 | 35 |
| 55 | 38 | 3 | 4 | 55 | 37 | 3 | 5 | 55 | 36 |
| 54 | 39 | 3 | 4 | 54 | 38 | 3 | 5 | 54 | 37 |
| 53 | 40 | 3 | 4 | 53 | 39 | 3 | 5 | 53 | 38 |
| 52 | 41 | 3 | 4 | 52 | 40 | 3 | 5 | 52 | 39 |
| 51 | 42 | 3 | 4 | 51 | 41 | 3 | 5 | 51 | 40 |
| 50 | 43 | 3 | 4 | 50 | 42 | 3 | 5 | 50 | 41 |
| 49 | 44 | 3 | 4 | 49 | 43 | 3 | 5 | 49 | 42 |
| 48 | 45 | 3 | 4 | 48 | 44 | 3 | 5 | 48 | 43 |
| 47 | 46 | 3 | 4 | 47 | 45 | 3 | 5 | 47 | 44 |
| 46 | 47 | 3 | 4 | 46 | 46 | 3 | 5 | 46 | 45 |
| 45 | 48 | 3 | 4 | 45 | 47 | 3 | 5 | 45 | 46 |
| 44 | 49 | 3 | 4 | 44 | 48 | 3 | 5 | 44 | 47 |
| 43 | 50 | 3 | 4 | 43 | 49 | 3 | 5 | 43 | 48 |
| 42 | 51 | 3 | 4 | 42 | 50 | 3 | 5 | 42 | 49 |
| 41 | 52 | 3 | 4 | 41 | 51 | 3 | 5 | 41 | 50 |
| 40 | 53 | 3 | 4 | 40 | 52 | 3 | 5 | 40 | 51 |
| 39 | 54 | 3 | 4 | 39 | 53 | 3 | 5 | 39 | 52 |
| 38 | 55 | 3 | 4 | 38 | 54 | 3 | 5 | 38 | 53 |
| 37 | 56 | 3 | 4 | 37 | 55 | 3 | 5 | 37 | 54 |
| 36 | 57 | 3 | 4 | 36 | 56 | 3 | 5 | 36 | 55 |
| 35 | 58 | 3 | 4 | 35 | 57 | 3 | 5 | 35 | 56 |
| 34 | 59 | 3 | 4 | 34 | 58 | 3 | 5 | 34 | 57 |
| 33 | 60 | 3 | 4 | 33 | 59 | 3 | 5 | 33 | 58 |
| 32 | 61 | 3 | 4 | 32 | 60 | 3 | 5 | 32 | 59 |
| 31 | 62 | 3 | 4 | 31 | 61 | 3 | 5 | 31 | 60 |
| 30 | 63 | 3 | 4 | 30 | 62 | 3 | 5 | 30 | 61 |
| 60 | 31 | 1 | 8 | 60 | 30 | 1 | 9 | 60 | 29 |
| 59 | 32 | 1 | 8 | 59 | 31 | 1 | 9 | 59 | 30 |
| 58 | 33 | 1 | 8 | 58 | 32 | 1 | 9 | 58 | 31 |
| 57 | 34 | 1 | 8 | 57 | 33 | 1 | 9 | 57 | 32 |
| 56 | 35 | 1 | 8 | 56 | 34 | 1 | 9 | 56 | 33 |
| 55 | 36 | 1 | 8 | 55 | 35 | 1 | 9 | 55 | 34 |
| 54 | 37 | 1 | 8 | 54 | 36 | 1 | 9 | 54 | 35 |
| 53 | 38 | 1 | 8 | 53 | 37 | 1 | 9 | 53 | 36 |
| 52 | 39 | 1 | 8 | 52 | 38 | 1 | 9 | 52 | 37 |
| 51 | 40 | 1 | 8 | 51 | 39 | 1 | 9 | 51 | 38 |
| 50 | 41 | 1 | 8 | 50 | 40 | 1 | 9 | 50 | 39 |
| 49 | 42 | 1 | 8 | 49 | 41 | 1 | 9 | 49 | 40 |
| 48 | 43 | 1 | 8 | 48 | 42 | 1 | 9 | 48 | 41 |
| 47 | 44 | 1 | 8 | 47 | 43 | 1 | 9 | 47 | 42 |
| 46 | 45 | 1 | 8 | 46 | 44 | 1 | 9 | 46 | 43 |
| 45 | 46 | 1 | 8 | 45 | 45 | 1 | 9 | 45 | 44 |
| 44 | 47 | 1 | 8 | 44 | 46 | 1 | 9 | 44 | 45 |
| 43 | 48 | 1 | 8 | 43 | 47 | 1 | 9 | 43 | 46 |
| 42 | 49 | 1 | 8 | 42 | 48 | 1 | 9 | 42 | 47 |
| 41 | 50 | 1 | 8 | 41 | 49 | 1 | 9 | 41 | 48 |
| 40 | 51 | 1 | 8 | 40 | 50 | 1 | 9 | 40 | 49 |
| 39 | 52 | 1 | 8 | 39 | 51 | 1 | 9 | 39 | 50 |
| 38 | 53 | 1 | 8 | 38 | 52 | 1 | 9 | 38 | 51 |
| 37 | 54 | 1 | 8 | 37 | 53 | 1 | 9 | 37 | 52 |
| 36 | 55 | 1 | 8 | 36 | 54 | 1 | 9 | 36 | 53 |
| 35 | 56 | 1 | 8 | 35 | 55 | 1 | 9 | 35 | 54 |
| 34 | 57 | 1 | 8 | 34 | 56 | 1 | 9 | 34 | 55 |
| 33 | 58 | 1 | 8 | 33 | 57 | 1 | 9 | 33 | 56 |
| 32 | 59 | 1 | 8 | 32 | 58 | 1 | 9 | 32 | 57 |
| 31 | 60 | 1 | 8 | 31 | 59 | 1 | 9 | 31 | 58 |
| 30 | 61 | 1 | 8 | 30 | 60 | 1 | 9 | 30 | 59 |
| 60 | 30.8 | 1.2 | 8 | 60 | 29.8 | 1.2 | 9 | 60 | 28.8 |
| 59 | 31.8 | 1.2 | 8 | 59 | 30.8 | 1.2 | 9 | 59 | 29.8 |
| 58 | 32.8 | 1.2 | 8 | 58 | 31.8 | 1.2 | 9 | 58 | 30.8 |
| 57 | 33.8 | 1.2 | 8 | 57 | 32.8 | 1.2 | 9 | 57 | 31.8 |
| 56 | 34.8 | 1.2 | 8 | 56 | 33.8 | 1.2 | 9 | 56 | 32.8 |
| 55 | 35.8 | 1.2 | 8 | 55 | 34.8 | 1.2 | 9 | 55 | 33.8 |
| 54 | 36.8 | 1.2 | 8 | 54 | 35.8 | 1.2 | 9 | 54 | 34.8 |
| 53 | 37.8 | 1.2 | 8 | 53 | 36.8 | 1.2 | 9 | 53 | 35.8 |
| 52 | 38.8 | 1.2 | 8 | 52 | 37.8 | 1.2 | 9 | 52 | 36.8 |
| 51 | 39.8 | 1.2 | 8 | 51 | 38.8 | 1.2 | 9 | 51 | 37.8 |
| 50 | 40.8 | 1.2 | 8 | 50 | 39.8 | 1.2 | 9 | 50 | 38.8 |
| 49 | 41.8 | 1.2 | 8 | 49 | 40.8 | 1.2 | 9 | 49 | 39.8 |
| 48 | 42.8 | 1.2 | 8 | 48 | 41.8 | 1.2 | 9 | 48 | 40.8 |
| 47 | 43.8 | 1.2 | 8 | 47 | 42.8 | 1.2 | 9 | 47 | 41.8 |
| 46 | 44.8 | 1.2 | 8 | 46 | 43.8 | 1.2 | 9 | 46 | 42.8 |
| 45 | 45.8 | 1.2 | 8 | 45 | 44.8 | 1.2 | 9 | 45 | 43.8 |
| 44 | 46.8 | 1.2 | 8 | 44 | 45.8 | 1.2 | 9 | 44 | 44.8 |
| 43 | 47.8 | 1.2 | 8 | 43 | 46.8 | 1.2 | 9 | 43 | 45.8 |
| 42 | 48.8 | 1.2 | 8 | 42 | 47.8 | 1.2 | 9 | 42 | 46.8 |
| 41 | 49.8 | 1.2 | 8 | 41 | 48.8 | 1.2 | 9 | 41 | 47.8 |
| 40 | 50.8 | 1.2 | 8 | 40 | 49.8 | 1.2 | 9 | 40 | 48.8 |
| 39 | 51.8 | 1.2 | 8 | 39 | 50.8 | 1.2 | 9 | 39 | 49.8 |
| 38 | 52.8 | 1.2 | 8 | 38 | 51.8 | 1.2 | 9 | 38 | 50.8 |
| 37 | 53.8 | 1.2 | 8 | 37 | 52.8 | 1.2 | 9 | 37 | 51.8 |
| 36 | 54.8 | 1.2 | 8 | 36 | 53.8 | 1.2 | 9 | 36 | 52.8 |
| 35 | 55.8 | 1.2 | 8 | 35 | 54.8 | 1.2 | 9 | 35 | 53.8 |
| 34 | 56.8 | 1.2 | 8 | 34 | 55.8 | 1.2 | 9 | 34 | 54.8 |
| 33 | 57.8 | 1.2 | 8 | 33 | 56.8 | 1.2 | 9 | 33 | 55.8 |
| 32 | 58.8 | 1.2 | 8 | 32 | 57.8 | 1.2 | 9 | 32 | 56.8 |
| 31 | 59.8 | 1.2 | 8 | 31 | 58.8 | 1.2 | 9 | 31 | 57.8 |
| 30 | 60.8 | 1.2 | 8 | 30 | 59.8 | 1.2 | 9 | 30 | 58.8 |
| 60 | 30.6 | 1.4 | 8 | 60 | 29.6 | 1.4 | 9 | 60 | 28.6 |
| 59 | 31.6 | 1.4 | 8 | 59 | 30.6 | 1.4 | 9 | 59 | 29.6 |
| 58 | 32.6 | 1.4 | 8 | 58 | 31.6 | 1.4 | 9 | 58 | 30.6 |
| 57 | 33.6 | 1.4 | 8 | 57 | 32.6 | 1.4 | 9 | 57 | 31.6 |
| 56 | 34.6 | 1.4 | 8 | 56 | 33.6 | 1.4 | 9 | 56 | 32.6 |
| 55 | 35.6 | 1.4 | 8 | 55 | 34.6 | 1.4 | 9 | 55 | 33.6 |
| 54 | 36.6 | 1.4 | 8 | 54 | 35.6 | 1.4 | 9 | 54 | 34.6 |
| 53 | 37.6 | 1.4 | 8 | 53 | 36.6 | 1.4 | 9 | 53 | 35.6 |
| 52 | 38.6 | 1.4 | 8 | 52 | 37.6 | 1.4 | 9 | 52 | 36.6 |
| 51 | 39.6 | 1.4 | 8 | 51 | 38.6 | 1.4 | 9 | 51 | 37.6 |
| 50 | 40.6 | 1.4 | 8 | 50 | 39.6 | 1.4 | 9 | 50 | 38.6 |
| 49 | 41.6 | 1.4 | 8 | 49 | 40.6 | 1.4 | 9 | 49 | 39.6 |
| 48 | 42.6 | 1.4 | 8 | 48 | 41.6 | 1.4 | 9 | 48 | 40.6 |
| 47 | 43.6 | 1.4 | 8 | 47 | 42.6 | 1.4 | 9 | 47 | 41.6 |
| 46 | 44.6 | 1.4 | 8 | 46 | 43.6 | 1.4 | 9 | 46 | 42.6 |
| 45 | 45.6 | 1.4 | 8 | 45 | 44.6 | 1.4 | 9 | 45 | 43.6 |
| 44 | 46.6 | 1.4 | 8 | 44 | 45.6 | 1.4 | 9 | 44 | 44.6 |
| 43 | 47.6 | 1.4 | 8 | 43 | 46.6 | 1.4 | 9 | 43 | 45.6 |
| 42 | 48.6 | 1.4 | 8 | 42 | 47.6 | 1.4 | 9 | 42 | 46.6 |
| 41 | 49.6 | 1.4 | 8 | 41 | 48.6 | 1.4 | 9 | 41 | 47.6 |
| 40 | 50.6 | 1.4 | 8 | 40 | 49.6 | 1.4 | 9 | 40 | 48.6 |
| 39 | 51.6 | 1.4 | 8 | 39 | 50.6 | 1.4 | 9 | 39 | 49.6 |
| 38 | 52.6 | 1.4 | 8 | 38 | 51.6 | 1.4 | 9 | 38 | 50.6 |
| 37 | 53.6 | 1.4 | 8 | 37 | 52.6 | 1.4 | 9 | 37 | 51.6 |
| 36 | 54.6 | 1.4 | 8 | 36 | 53.6 | 1.4 | 9 | 36 | 52.6 |
| 35 | 55.6 | 1.4 | 8 | 35 | 54.6 | 1.4 | 9 | 35 | 53.6 |
| 34 | 56.6 | 1.4 | 8 | 34 | 55.6 | 1.4 | 9 | 34 | 54.6 |
| 33 | 57.6 | 1.4 | 8 | 33 | 56.6 | 1.4 | 9 | 33 | 55.6 |
| 32 | 58.6 | 1.4 | 8 | 32 | 57.6 | 1.4 | 9 | 32 | 56.6 |
| 31 | 59.6 | 1.4 | 8 | 31 | 58.6 | 1.4 | 9 | 31 | 57.6 |
| 30 | 60.6 | 1.4 | 8 | 30 | 59.6 | 1.4 | 9 | 30 | 58.6 |
| 60 | 30.4 | 1.6 | 8 | 60 | 29.4 | 1.6 | 9 | 60 | 28.4 |
| 59 | 31.4 | 1.6 | 8 | 59 | 30.4 | 1.6 | 9 | 59 | 29.4 |
| 58 | 32.4 | 1.6 | 8 | 58 | 31.4 | 1.6 | 9 | 58 | 30.4 |
| 57 | 33.4 | 1.6 | 8 | 57 | 32.4 | 1.6 | 9 | 57 | 31.4 |
| 56 | 34.4 | 1.6 | 8 | 56 | 33.4 | 1.6 | 9 | 56 | 32.4 |
| 55 | 35.4 | 1.6 | 8 | 55 | 34.4 | 1.6 | 9 | 55 | 33.4 |
| 54 | 36.4 | 1.6 | 8 | 54 | 35.4 | 1.6 | 9 | 54 | 34.4 |
| 53 | 37.4 | 1.6 | 8 | 53 | 36.4 | 1.6 | 9 | 53 | 35.4 |
| 52 | 38.4 | 1.6 | 8 | 52 | 37.4 | 1.6 | 9 | 52 | 36.4 |
| 51 | 39.4 | 1.6 | 8 | 51 | 38.4 | 1.6 | 9 | 51 | 37.4 |
| 50 | 40.4 | 1.6 | 8 | 50 | 39.4 | 1.6 | 9 | 50 | 38.4 |
| 49 | 41.4 | 1.6 | 8 | 49 | 40.4 | 1.6 | 9 | 49 | 39.4 |
| 48 | 42.4 | 1.6 | 8 | 48 | 41.4 | 1.6 | 9 | 48 | 40.4 |
| 47 | 43.4 | 1.6 | 8 | 47 | 42.4 | 1.6 | 9 | 47 | 41.4 |
| 46 | 44.4 | 1.6 | 8 | 46 | 43.4 | 1.6 | 9 | 46 | 42.4 |
| 45 | 45.4 | 1.6 | 8 | 45 | 44.4 | 1.6 | 9 | 45 | 43.4 |
| 44 | 46.4 | 1.6 | 8 | 44 | 45.4 | 1.6 | 9 | 44 | 44.4 |
| 43 | 47.4 | 1.6 | 8 | 43 | 46.4 | 1.6 | 9 | 43 | 45.4 |
| 42 | 48.4 | 1.6 | 8 | 42 | 47.4 | 1.6 | 9 | 42 | 46.4 |
| 41 | 49.4 | 1.6 | 8 | 41 | 48.4 | 1.6 | 9 | 41 | 47.4 |
| 40 | 50.4 | 1.6 | 8 | 40 | 49.4 | 1.6 | 9 | 40 | 48.4 |
| 39 | 51.4 | 1.6 | 8 | 39 | 50.4 | 1.6 | 9 | 39 | 49.4 |
| 38 | 52.4 | 1.6 | 8 | 38 | 51.4 | 1.6 | 9 | 38 | 50.4 |
| 37 | 53.4 | 1.6 | 8 | 37 | 52.4 | 1.6 | 9 | 37 | 51.4 |
| 36 | 54.4 | 1.6 | 8 | 36 | 53.4 | 1.6 | 9 | 36 | 52.4 |
| 35 | 55.4 | 1.6 | 8 | 35 | 54.4 | 1.6 | 9 | 35 | 53.4 |
| 34 | 56.4 | 1.6 | 8 | 34 | 55.4 | 1.6 | 9 | 34 | 54.4 |
| 33 | 57.4 | 1.6 | 8 | 33 | 56.4 | 1.6 | 9 | 33 | 55.4 |
| 32 | 58.4 | 1.6 | 8 | 32 | 57.4 | 1.6 | 9 | 32 | 56.4 |
| 31 | 59.4 | 1.6 | 8 | 31 | 58.4 | 1.6 | 9 | 31 | 57.4 |
| 30 | 60.4 | 1.6 | 8 | 30 | 59.4 | 1.6 | 9 | 30 | 58.4 |
| 60 | 30.2 | 1.8 | 8 | 60 | 29.2 | 1.8 | 9 | 60 | 28.2 |
| 59 | 31.2 | 1.8 | 8 | 59 | 30.2 | 1.8 | 9 | 59 | 29.2 |
| 58 | 32.2 | 1.8 | 8 | 58 | 31.2 | 1.8 | 9 | 58 | 30.2 |
| 57 | 33.2 | 1.8 | 8 | 57 | 32.2 | 1.8 | 9 | 57 | 31.2 |
| 56 | 34.2 | 1.8 | 8 | 56 | 33.2 | 1.8 | 9 | 56 | 32.2 |
| 55 | 35.2 | 1.8 | 8 | 55 | 34.2 | 1.8 | 9 | 55 | 33.2 |
| 54 | 36.2 | 1.8 | 8 | 54 | 35.2 | 1.8 | 9 | 54 | 34.2 |
| 53 | 37.2 | 1.8 | 8 | 53 | 36.2 | 1.8 | 9 | 53 | 35.2 |
| 52 | 38.2 | 1.8 | 8 | 52 | 37.2 | 1.8 | 9 | 52 | 36.2 |
| 51 | 39.2 | 1.8 | 8 | 51 | 38.2 | 1.8 | 9 | 51 | 37.2 |
| 50 | 40.2 | 1.8 | 8 | 50 | 39.2 | 1.8 | 9 | 50 | 38.2 |
| 49 | 41.2 | 1.8 | 8 | 49 | 40.2 | 1.8 | 9 | 49 | 39.2 |
| 48 | 42.2 | 1.8 | 8 | 48 | 41.2 | 1.8 | 9 | 48 | 40.2 |
| 47 | 43.2 | 1.8 | 8 | 47 | 42.2 | 1.8 | 9 | 47 | 41.2 |
| 46 | 44.2 | 1.8 | 8 | 46 | 43.2 | 1.8 | 9 | 46 | 42.2 |
| 45 | 45.2 | 1.8 | 8 | 45 | 44.2 | 1.8 | 9 | 45 | 43.2 |
| 44 | 46.2 | 1.8 | 8 | 44 | 45.2 | 1.8 | 9 | 44 | 44.2 |
| 43 | 47.2 | 1.8 | 8 | 43 | 46.2 | 1.8 | 9 | 43 | 45.2 |
| 42 | 48.2 | 1.8 | 8 | 42 | 47.2 | 1.8 | 9 | 42 | 46.2 |
| 41 | 49.2 | 1.8 | 8 | 41 | 48.2 | 1.8 | 9 | 41 | 47.2 |
| 40 | 50.2 | 1.8 | 8 | 40 | 49.2 | 1.8 | 9 | 40 | 48.2 |
| 39 | 51.2 | 1.8 | 8 | 39 | 50.2 | 1.8 | 9 | 39 | 49.2 |
| 38 | 52.2 | 1.8 | 8 | 38 | 51.2 | 1.8 | 9 | 38 | 50.2 |
| 37 | 53.2 | 1.8 | 8 | 37 | 52.2 | 1.8 | 9 | 37 | 51.2 |
| 36 | 54.2 | 1.8 | 8 | 36 | 53.2 | 1.8 | 9 | 36 | 52.2 |
| 35 | 55.2 | 1.8 | 8 | 35 | 54.2 | 1.8 | 9 | 35 | 53.2 |
| 34 | 56.2 | 1.8 | 8 | 34 | 55.2 | 1.8 | 9 | 34 | 54.2 |
| 33 | 57.2 | 1.8 | 8 | 33 | 56.2 | 1.8 | 9 | 33 | 55.2 |
| 32 | 58.2 | 1.8 | 8 | 32 | 57.2 | 1.8 | 9 | 32 | 56.2 |
| 31 | 59.2 | 1.8 | 8 | 31 | 58.2 | 1.8 | 9 | 31 | 57.2 |
| 30 | 60.2 | 1.8 | 8 | 30 | 59.2 | 1.8 | 9 | 30 | 58.2 |
| 60 | 30 | 2 | 8 | 60 | 29 | 2 | 9 | 60 | 28 |
| 59 | 31 | 2 | 8 | 59 | 30 | 2 | 9 | 59 | 29 |
| 58 | 32 | 2 | 8 | 58 | 31 | 2 | 9 | 58 | 30 |
| 57 | 33 | 2 | 8 | 57 | 32 | 2 | 9 | 57 | 31 |
| 56 | 34 | 2 | 8 | 56 | 33 | 2 | 9 | 56 | 32 |
| 55 | 35 | 2 | 8 | 55 | 34 | 2 | 9 | 55 | 33 |
| 54 | 36 | 2 | 8 | 54 | 35 | 2 | 9 | 54 | 34 |
| 53 | 37 | 2 | 8 | 53 | 36 | 2 | 9 | 53 | 35 |
| 52 | 38 | 2 | 8 | 52 | 37 | 2 | 9 | 52 | 36 |
| 51 | 39 | 2 | 8 | 51 | 38 | 2 | 9 | 51 | 37 |
| 50 | 40 | 2 | 8 | 50 | 39 | 2 | 9 | 50 | 38 |
| 49 | 41 | 2 | 8 | 49 | 40 | 2 | 9 | 49 | 39 |
| 48 | 42 | 2 | 8 | 48 | 41 | 2 | 9 | 48 | 40 |
| 47 | 43 | 2 | 8 | 47 | 42 | 2 | 9 | 47 | 41 |
| 46 | 44 | 2 | 8 | 46 | 43 | 2 | 9 | 46 | 42 |
| 45 | 45 | 2 | 8 | 45 | 44 | 2 | 9 | 45 | 43 |
| 44 | 46 | 2 | 8 | 44 | 45 | 2 | 9 | 44 | 44 |
| 43 | 47 | 2 | 8 | 43 | 46 | 2 | 9 | 43 | 45 |
| 42 | 48 | 2 | 8 | 42 | 47 | 2 | 9 | 42 | 46 |
| 41 | 49 | 2 | 8 | 41 | 48 | 2 | 9 | 41 | 47 |
| 40 | 50 | 2 | 8 | 40 | 49 | 2 | 9 | 40 | 48 |
| 39 | 51 | 2 | 8 | 39 | 50 | 2 | 9 | 39 | 49 |
| 38 | 52 | 2 | 8 | 38 | 51 | 2 | 9 | 38 | 50 |
| 37 | 53 | 2 | 8 | 37 | 52 | 2 | 9 | 37 | 51 |
| 36 | 54 | 2 | 8 | 36 | 53 | 2 | 9 | 36 | 52 |
| 35 | 55 | 2 | 8 | 35 | 54 | 2 | 9 | 35 | 53 |
| 34 | 56 | 2 | 8 | 34 | 55 | 2 | 9 | 34 | 54 |
| 33 | 57 | 2 | 8 | 33 | 56 | 2 | 9 | 33 | 55 |
| 32 | 58 | 2 | 8 | 32 | 57 | 2 | 9 | 32 | 56 |
| co | 59 | 2 | 8 | 31 | 58 | 2 | 9 | 31 | 57 |
| 30 | 60 | 2 | 8 | 30 | 59 | 2 | 9 | 30 | 58 |
| 60 | 29.8 | 2.2 | 8 | 60 | 28.8 | 2.2 | 9 | 60 | 27.8 |
| 59 | 30.8 | 2.2 | 8 | 59 | 29.8 | 2.2 | 9 | 59 | 28.8 |
| 58 | 31.8 | 2.2 | 8 | 58 | 30.8 | 2.2 | 9 | 58 | 29.8 |
| 57 | 32.8 | 2.2 | 8 | 57 | 31.8 | 2.2 | 9 | 57 | 30.8 |
| 56 | 33.8 | 2.2 | 8 | 56 | 32.8 | 2.2 | 9 | 56 | 31.8 |
| 55 | 34.8 | 2.2 | 8 | 55 | 33.8 | 2.2 | 9 | 55 | 32.8 |
| 54 | 35.8 | 2.2 | 8 | 54 | 34.8 | 2.2 | 9 | 54 | 33.8 |
| 53 | 36.8 | 2.2 | 8 | 53 | 35.8 | 2.2 | 9 | 53 | 34.8 |
| 52 | 37.8 | 2.2 | 8 | 52 | 36.8 | 2.2 | 9 | 52 | 35.8 |
| 51 | 38.8 | 2.2 | 8 | 51 | 37.8 | 2.2 | 9 | 51 | 36.8 |
| 50 | 39.8 | 2.2 | 8 | 50 | 38.8 | 2.2 | 9 | 50 | 37.8 |
| 49 | 40.8 | 2.2 | 8 | 49 | 39.8 | 2.2 | 9 | 49 | 38.8 |
| 48 | 41.8 | 2.2 | 8 | 48 | 40.8 | 2.2 | 9 | 48 | 39.8 |
| 47 | 42.8 | 2.2 | 8 | 47 | 41.8 | 2.2 | 9 | 47 | 40.8 |
| 46 | 43.8 | 2.2 | 8 | 46 | 42.8 | 2.2 | 9 | 46 | 41.8 |
| 45 | 44.8 | 2.2 | 8 | 45 | 43.8 | 2.2 | 9 | 45 | 42.8 |
| 44 | 45.8 | 2.2 | 8 | 44 | 44.8 | 2.2 | 9 | 44 | 43.8 |
| 43 | 46.8 | 2.2 | 8 | 43 | 45.8 | 2.2 | 9 | 43 | 44.8 |
| 42 | 47.8 | 2.2 | 8 | 42 | 46.8 | 2.2 | 9 | 42 | 45.8 |
| 41 | 48.8 | 2.2 | 8 | 41 | 47.8 | 2.2 | 9 | 41 | 46.8 |
| 40 | 49.8 | 2.2 | 8 | 40 | 48.8 | 2.2 | 9 | 40 | 47.8 |
| 39 | 50.8 | 2.2 | 8 | 39 | 49.8 | 2.2 | 9 | 39 | 48.8 |
| 38 | 51.8 | 2.2 | 8 | 38 | 50.8 | 2.2 | 9 | 38 | 49.8 |
| 37 | 52.8 | 2.2 | 8 | 37 | 51.8 | 2.2 | 9 | 37 | 50.8 |
| 36 | 53.8 | 2.2 | 8 | 36 | 52.8 | 2.2 | 9 | 36 | 51.8 |
| 35 | 54.8 | 2.2 | 8 | 35 | 53.8 | 2.2 | 9 | 35 | 52.8 |
| 34 | 55.8 | 2.2 | 8 | 34 | 54.8 | 2.2 | 9 | 34 | 53.8 |
| 33 | 56.8 | 2.2 | 8 | 33 | 55.8 | 2.2 | 9 | 33 | 54.8 |
| 32 | 57.8 | 2.2 | 8 | 32 | 56.8 | 2.2 | 9 | 32 | 55.8 |
| 31 | 58.8 | 2.2 | 8 | 31 | 57.8 | 2.2 | 9 | 31 | 56.8 |
| 30 | 59.8 | 2.2 | 8 | 30 | 58.8 | 2.2 | 9 | 30 | 57.8 |
| 60 | 29.6 | 2.4 | 8 | 60 | 28.6 | 2.4 | 9 | 60 | 27.6 |
| 59 | 30.6 | 2.4 | 8 | 59 | 29.6 | 2.4 | 9 | 59 | 28.6 |
| 58 | 31.6 | 2.4 | 8 | 58 | 30.6 | 2.4 | 9 | 58 | 29.6 |
| 57 | 32.6 | 2.4 | 8 | 57 | 31.6 | 2.4 | 9 | 57 | 30.6 |
| 56 | 33.6 | 2.4 | 8 | 56 | 32.6 | 2.4 | 9 | 56 | 31.6 |
| 55 | 34.6 | 2.4 | 8 | 55 | 33.6 | 2.4 | 9 | 55 | 32.6 |
| 54 | 35.6 | 2.4 | 8 | 54 | 34.6 | 2.4 | 9 | 54 | 33.6 |
| 53 | 36.6 | 2.4 | 8 | 53 | 35.6 | 2.4 | 9 | 53 | 34.6 |
| 52 | 37.6 | 2.4 | 8 | 52 | 36.6 | 2.4 | 9 | 52 | 35.6 |
| 51 | 38.6 | 2.4 | 8 | 51 | 37.6 | 2.4 | 9 | 51 | 36.6 |
| 50 | 39.6 | 2.4 | 8 | 50 | 38.6 | 2.4 | 9 | 50 | 37.6 |
| 49 | 40.6 | 2.4 | 8 | 49 | 39.6 | 2.4 | 9 | 49 | 38.6 |
| 48 | 41.6 | 2.4 | 8 | 48 | 40.6 | 2.4 | 9 | 48 | 39.6 |
| 47 | 42.6 | 2.4 | 8 | 47 | 41.6 | 2.4 | 9 | 47 | 40.6 |
| 46 | 43.6 | 2.4 | 8 | 46 | 42.6 | 2.4 | 9 | 46 | 41.6 |
| 45 | 44.6 | 2.4 | 8 | 45 | 43.6 | 2.4 | 9 | 45 | 42.6 |
| 44 | 45.6 | 2.4 | 8 | 44 | 44.6 | 2.4 | 9 | 44 | 43.6 |
| 43 | 46.6 | 2.4 | 8 | 43 | 45.6 | 2.4 | 9 | 43 | 44.6 |
| 42 | 47.6 | 2.4 | 8 | 42 | 46.6 | 2.4 | 9 | 42 | 45.6 |
| 41 | 48.6 | 2.4 | 8 | 41 | 47.6 | 2.4 | 9 | 41 | 46.6 |
| 40 | 49.6 | 2.4 | 8 | 40 | 48.6 | 2.4 | 9 | 40 | 47.6 |
| 39 | 50.6 | 2.4 | 8 | 39 | 49.6 | 2.4 | 9 | 39 | 48.6 |
| 38 | 51.6 | 2.4 | 8 | 38 | 50.6 | 2.4 | 9 | 38 | 49.6 |
| 37 | 52.6 | 2.4 | 8 | 37 | 51.6 | 2.4 | 9 | 37 | 50.6 |
| 36 | 53.6 | 2.4 | 8 | 36 | 52.6 | 2.4 | 9 | 36 | 51.6 |
| 35 | 54.6 | 2.4 | 8 | 35 | 53.6 | 2.4 | 9 | 35 | 52.6 |
| 34 | 55.6 | 2.4 | 8 | 34 | 54.6 | 2.4 | 9 | 34 | 53.6 |
| 33 | 56.6 | 2.4 | 8 | 33 | 55.6 | 2.4 | 9 | 33 | 54.6 |
| 32 | 57.6 | 2.4 | 8 | 32 | 56.6 | 2.4 | 9 | 32 | 55.6 |
| 31 | 58.6 | 2.4 | 8 | 31 | 57.6 | 2.4 | 9 | 31 | 56.6 |
| 30 | 59.6 | 2.4 | 8 | 30 | 58.6 | 2.4 | 9 | 30 | 57.6 |
| 60 | 29.4 | 2.6 | 8 | 60 | 28.4 | 2.6 | 9 | 60 | 27.4 |
| 59 | 30.4 | 2.6 | 8 | 59 | 29.4 | 2.6 | 9 | 59 | 28.4 |
| 58 | 31.4 | 2.6 | 8 | 58 | 30.4 | 2.6 | 9 | 58 | 29.4 |
| 57 | 32.4 | 2.6 | 8 | 57 | 31.4 | 2.6 | 9 | 57 | 30.4 |
| 56 | 33.4 | 2.6 | 8 | 56 | 32.4 | 2.6 | 9 | 56 | 31.4 |
| 55 | 34.4 | 2.6 | 8 | 55 | 33.4 | 2.6 | 9 | 55 | 32.4 |
| 54 | 35.4 | 2.6 | 8 | 54 | 34.4 | 2.6 | 9 | 54 | 33.4 |
| 53 | 36.4 | 2.6 | 8 | 53 | 35.4 | 2.6 | 9 | 53 | 34.4 |
| 52 | 37.4 | 2.6 | 8 | 52 | 36.4 | 2.6 | 9 | 52 | 35.4 |
| 51 | 38.4 | 2.6 | 8 | 51 | 37.4 | 2.6 | 9 | 51 | 36.4 |
| 50 | 39.4 | 2.6 | 8 | 50 | 38.4 | 2.6 | 9 | 50 | 37.4 |
| 49 | 40.4 | 2.6 | 8 | 49 | 39.4 | 2.6 | 9 | 49 | 38.4 |
| 48 | 41.4 | 2.6 | 8 | 48 | 40.4 | 2.6 | 9 | 48 | 39.4 |
| 47 | 42.4 | 2.6 | 8 | 47 | 41.4 | 2.6 | 9 | 47 | 40.4 |
| 46 | 43.4 | 2.6 | 8 | 46 | 42.4 | 2.6 | 9 | 46 | 41.4 |
| 45 | 44.4 | 2.6 | 8 | 45 | 43.4 | 2.6 | 9 | 45 | 42.4 |
| 44 | 45.4 | 2.6 | 8 | 44 | 44.4 | 2.6 | 9 | 44 | 43.4 |
| 43 | 46.4 | 2.6 | 8 | 43 | 45.4 | 2.6 | 9 | 43 | 44.4 |
| 42 | 47.4 | 2.6 | 8 | 42 | 46.4 | 2.6 | 9 | 42 | 45.4 |
| 41 | 48.4 | 2.6 | 8 | 41 | 47.4 | 2.6 | 9 | 41 | 46.4 |
| 40 | 49.4 | 2.6 | 8 | 40 | 48.4 | 2.6 | 9 | 40 | 47.4 |
| 39 | 50.4 | 2.6 | 8 | 39 | 49.4 | 2.6 | 9 | 39 | 48.4 |
| 38 | 51.4 | 2.6 | 8 | 38 | 50.4 | 2.6 | 9 | 38 | 49.4 |
| 37 | 52.4 | 2.6 | 8 | 37 | 51.4 | 2.6 | 9 | 37 | 50.4 |
| 36 | 53.4 | 2.6 | 8 | 36 | 52.4 | 2.6 | 9 | 36 | 51.4 |
| 35 | 54.4 | 2.6 | 8 | 35 | 53.4 | 2.6 | 9 | 35 | 52.4 |
| 34 | 55.4 | 2.6 | 8 | 34 | 54.4 | 2.6 | 9 | 34 | 53.4 |
| 33 | 56.4 | 2.6 | 8 | 33 | 55.4 | 2.6 | 9 | 33 | 54.4 |
| 32 | 57.4 | 2.6 | 8 | 32 | 56.4 | 2.6 | 9 | 32 | 55.4 |
| 31 | 58.4 | 2.6 | 8 | 31 | 57.4 | 2.6 | 9 | 31 | 56.4 |
| 30 | 59.4 | 2.6 | 8 | 30 | 58.4 | 2.6 | 9 | 30 | 57.4 |
| 60 | 29.2 | 2.8 | 8 | 60 | 28.2 | 2.8 | 9 | 60 | 27.2 |
| 59 | 30.2 | 2.8 | 8 | 59 | 29.2 | 2.8 | 9 | 59 | 28.2 |
| 58 | 31.2 | 2.8 | 8 | 58 | 30.2 | 2.8 | 9 | 58 | 29.2 |
| 57 | 32.2 | 2.8 | 8 | 57 | 31.2 | 2.8 | 9 | 57 | 30.2 |
| 56 | 33.2 | 2.8 | 8 | 56 | 32.2 | 2.8 | 9 | 56 | 31.2 |
| 55 | 34.2 | 2.8 | 8 | 55 | 33.2 | 2.8 | 9 | 55 | 32.2 |
| 54 | 35.2 | 2.8 | 8 | 54 | 34.2 | 2.8 | 9 | 54 | 33.2 |
| 53 | 36.2 | 2.8 | 8 | 53 | 35.2 | 2.8 | 9 | 53 | 34.2 |
| 52 | 37.2 | 2.8 | 8 | 52 | 36.2 | 2.8 | 9 | 52 | 35.2 |
| 51 | 38.2 | 2.8 | 8 | 51 | 37.2 | 2.8 | 9 | 51 | 36.2 |
| 50 | 39.2 | 2.8 | 8 | 50 | 38.2 | 2.8 | 9 | 50 | 37.2 |
| 49 | 40.2 | 2.8 | 8 | 49 | 39.2 | 2.8 | 9 | 49 | 38.2 |
| 48 | 41.2 | 2.8 | 8 | 48 | 40.2 | 2.8 | 9 | 48 | 39.2 |
| 47 | 42.2 | 2.8 | 8 | 47 | 41.2 | 2.8 | 9 | 47 | 40.2 |
| 46 | 43.2 | 2.8 | 8 | 46 | 42.2 | 2.8 | 9 | 46 | 41.2 |
| 45 | 44.2 | 2.8 | 8 | 45 | 43.2 | 2.8 | 9 | 45 | 42.2 |
| 44 | 45.2 | 2.8 | 8 | 44 | 44.2 | 2.8 | 9 | 44 | 43.2 |
| 43 | 46.2 | 2.8 | 8 | 43 | 45.2 | 2.8 | 9 | 43 | 44.2 |
| 42 | 47.2 | 2.8 | 8 | 42 | 46.2 | 2.8 | 9 | 42 | 45.2 |
| 41 | 48.2 | 2.8 | 8 | 41 | 47.2 | 2.8 | 9 | 41 | 46.2 |
| 40 | 49.2 | 2.8 | 8 | 40 | 48.2 | 2.8 | 9 | 40 | 47.2 |
| 39 | 50.2 | 2.8 | 8 | 39 | 49.2 | 2.8 | 9 | 39 | 48.2 |
| 38 | 51.2 | 2.8 | 8 | 38 | 50.2 | 2.8 | 9 | 38 | 49.2 |
| 37 | 52.2 | 2.8 | 8 | 37 | 51.2 | 2.8 | 9 | 37 | 50.2 |
| 36 | 53.2 | 2.8 | 8 | 36 | 52.2 | 2.8 | 9 | 36 | 51.2 |
| 35 | 54.2 | 2.8 | 8 | 35 | 53.2 | 2.8 | 9 | 35 | 52.2 |
| 34 | 55.2 | 2.8 | 8 | 34 | 54.2 | 2.8 | 9 | 34 | 53.2 |
| 33 | 56.2 | 2.8 | 8 | 33 | 55.2 | 2.8 | 9 | 33 | 54.2 |
| 32 | 57.2 | 2.8 | 8 | 32 | 56.2 | 2.8 | 9 | 32 | 55.2 |
| 31 | 58.2 | 2.8 | 8 | 31 | 57.2 | 2.8 | 9 | 31 | 56.2 |
| 30 | 59.2 | 2.8 | 8 | 30 | 58.2 | 2.8 | 9 | 30 | 57.2 |
| 60 | 29 | 3 | 8 | 60 | 28 | 3 | 9 | 60 | 27 |
| 59 | 30 | 3 | 8 | 59 | 29 | 3 | 9 | 59 | 28 |
| 58 | 31 | 3 | 8 | 58 | 30 | 3 | 9 | 58 | 29 |
| 57 | 32 | 3 | 8 | 57 | 31 | 3 | 9 | 57 | 30 |
| 56 | 33 | 3 | 8 | 56 | 32 | 3 | 9 | 56 | 31 |
| 55 | 34 | 3 | 8 | 55 | 33 | 3 | 9 | 55 | 32 |
| 54 | 35 | 3 | 8 | 54 | 34 | 3 | 9 | 54 | 33 |
| 53 | 36 | 3 | 8 | 53 | 35 | 3 | 9 | 53 | 34 |
| 52 | 37 | 3 | 8 | 52 | 36 | 3 | 9 | 52 | 35 |
| 51 | 38 | 3 | 8 | 51 | 37 | 3 | 9 | 51 | 36 |
| 50 | 39 | 3 | 8 | 50 | 38 | 3 | 9 | 50 | 37 |
| 49 | 40 | 3 | 8 | 49 | 39 | 3 | 9 | 49 | 38 |
| 48 | 41 | 3 | 8 | 48 | 40 | 3 | 9 | 48 | 39 |
| 47 | 42 | 3 | 8 | 47 | 41 | 3 | 9 | 47 | 40 |
| 46 | 43 | 3 | 8 | 46 | 42 | 3 | 9 | 46 | 41 |
| 45 | 44 | 3 | 8 | 45 | 43 | 3 | 9 | 45 | 42 |
| 44 | 45 | 3 | 8 | 44 | 44 | 3 | 9 | 44 | 43 |
| 43 | 46 | 3 | 8 | 43 | 45 | 3 | 9 | 43 | 44 |
| 42 | 47 | 3 | 8 | 42 | 46 | 3 | 9 | 42 | 45 |
| 41 | 48 | 3 | 8 | 41 | 47 | 3 | 9 | 41 | 46 |
| 40 | 49 | 3 | 8 | 40 | 48 | 3 | 9 | 40 | 47 |
| 39 | 50 | 3 | 8 | 39 | 49 | 3 | 9 | 39 | 48 |
| 38 | 51 | 3 | 8 | 38 | 50 | 3 | 9 | 38 | 49 |
| 37 | 52 | 3 | 8 | 37 | 51 | 3 | 9 | 37 | 50 |
| 36 | 53 | 3 | 8 | 36 | 52 | 3 | 9 | 36 | 51 |
| 35 | 54 | 3 | 8 | 35 | 53 | 3 | 9 | 35 | 52 |
| 34 | 55 | 3 | 8 | 34 | 54 | 3 | 9 | 34 | 53 |
| 33 | 56 | 3 | 8 | 33 | 55 | 3 | 9 | 33 | 54 |
| 32 | 57 | 3 | 8 | 32 | 56 | 3 | 9 | 32 | 55 |
| 31 | 58 | 3 | 8 | 31 | 57 | 3 | 9 | 31 | 56 |
| 30 | 59 | 3 | 8 | 30 | 58 | 3 | 9 | 30 | 57 |
| 60 | 27 | 1 | 12 | 60 | 26 | 1 | 13 | 60 | 25 |
| 59 | 28 | 1 | 12 | 59 | 27 | 1 | 13 | 59 | 26 |
| 58 | 29 | 1 | 12 | 58 | 28 | 1 | 13 | 58 | 27 |
| 57 | 30 | 1 | 12 | 57 | 29 | 1 | 13 | 57 | 28 |
| 56 | 31 | 1 | 12 | 56 | 30 | 1 | 13 | 56 | 29 |
| 55 | 32 | 1 | 12 | 55 | 31 | 1 | 13 | 55 | 30 |
| 54 | 33 | 1 | 12 | 54 | 32 | 1 | 13 | 54 | 31 |
| 53 | 34 | 1 | 12 | 53 | 33 | 1 | 13 | 53 | 32 |
| 52 | 35 | 1 | 12 | 52 | 34 | 1 | 13 | 52 | 33 |
| 51 | 36 | 1 | 12 | 51 | 35 | 1 | 13 | 51 | 34 |
| 50 | 37 | 1 | 12 | 50 | 36 | 1 | 13 | 50 | 35 |
| 49 | 38 | 1 | 12 | 49 | 37 | 1 | 13 | 49 | 36 |
| 48 | 39 | 1 | 12 | 48 | 38 | 1 | 13 | 48 | 37 |
| 47 | 40 | 1 | 12 | 47 | 39 | 1 | 13 | 47 | 38 |
| 46 | 41 | 1 | 12 | 46 | 40 | 1 | 13 | 46 | 39 |
| 45 | 42 | 1 | 12 | 45 | 41 | 1 | 13 | 45 | 40 |
| 44 | 43 | 1 | 12 | 44 | 42 | 1 | 13 | 44 | 41 |
| 43 | 44 | 1 | 12 | 43 | 43 | 1 | 13 | 43 | 42 |
| 42 | 45 | 1 | 12 | 42 | 44 | 1 | 13 | 42 | 43 |
| 41 | 46 | 1 | 12 | 41 | 45 | 1 | 13 | 41 | 44 |
| 40 | 47 | 1 | 12 | 40 | 46 | 1 | 13 | 40 | 45 |
| 39 | 48 | 1 | 12 | 39 | 47 | 1 | 13 | 39 | 46 |
| 38 | 49 | 1 | 12 | 38 | 48 | 1 | 13 | 38 | 47 |
| 37 | 50 | 1 | 12 | 37 | 49 | 1 | 13 | 37 | 48 |
| 36 | 51 | 1 | 12 | 36 | 50 | 1 | 13 | 36 | 49 |
| 35 | 52 | 1 | 12 | 35 | 51 | 1 | 13 | 35 | 50 |
| 34 | 53 | 1 | 12 | 34 | 52 | 1 | 13 | 34 | 51 |
| 33 | 54 | 1 | 12 | 33 | 53 | 1 | 13 | 33 | 52 |
| 32 | 55 | 1 | 12 | 32 | 54 | 1 | 13 | 32 | 53 |
| 31 | 56 | 1 | 12 | 31 | 55 | 1 | 13 | 31 | 54 |
| 30 | 57 | 1 | 12 | 30 | 56 | 1 | 13 | 30 | 55 |
| 60 | 26.8 | 1.2 | 12 | 60 | 25.8 | 1.2 | 13 | 60 | 24.8 |
| 59 | 27.8 | 1.2 | 12 | 59 | 26.8 | 1.2 | 13 | 59 | 25.8 |
| 58 | 28.8 | 1.2 | 12 | 58 | 27.8 | 1.2 | 13 | 58 | 26.8 |
| 57 | 29.8 | 1.2 | 12 | 57 | 28.8 | 1.2 | 13 | 57 | 27.8 |
| 56 | 30.8 | 1.2 | 12 | 56 | 29.8 | 1.2 | 13 | 56 | 28.8 |
| 55 | 31.8 | 1.2 | 12 | 55 | 30.8 | 1.2 | 13 | 55 | 29.8 |
| 54 | 32.8 | 1.2 | 12 | 54 | 31.8 | 1.2 | 13 | 54 | 30.8 |
| 53 | 33.8 | 1.2 | 12 | 53 | 32.8 | 1.2 | 13 | 53 | 31.8 |
| 52 | 34.8 | 1.2 | 12 | 52 | 33.8 | 1.2 | 13 | 52 | 32.8 |
| 51 | 35.8 | 1.2 | 12 | 51 | 34.8 | 1.2 | 13 | 51 | 33.8 |
| 50 | 36.8 | 1.2 | 12 | 50 | 35.8 | 1.2 | 13 | 50 | 34.8 |
| 49 | 37.8 | 1.2 | 12 | 49 | 36.8 | 1.2 | 13 | 49 | 35.8 |
| 48 | 38.8 | 1.2 | 12 | 48 | 37.8 | 1.2 | 13 | 48 | 36.8 |
| 47 | 39.8 | 1.2 | 12 | 47 | 38.8 | 1.2 | 13 | 47 | 37.8 |
| 46 | 40.8 | 1.2 | 12 | 46 | 39.8 | 1.2 | 13 | 46 | 38.8 |
| 45 | 41.8 | 1.2 | 12 | 45 | 40.8 | 1.2 | 13 | 45 | 39.8 |
| 44 | 42.8 | 1.2 | 12 | 44 | 41.8 | 1.2 | 13 | 44 | 40.8 |
| 43 | 43.8 | 1.2 | 12 | 43 | 42.8 | 1.2 | 13 | 43 | 41.8 |
| 42 | 44.8 | 1.2 | 12 | 42 | 43.8 | 1.2 | 13 | 42 | 42.8 |
| 41 | 45.8 | 1.2 | 12 | 41 | 44.8 | 1.2 | 13 | 41 | 43.8 |
| 40 | 46.8 | 1.2 | 12 | 40 | 45.8 | 1.2 | 13 | 40 | 44.8 |
| 39 | 47.8 | 1.2 | 12 | 39 | 46.8 | 1.2 | 13 | 39 | 45.8 |
| 38 | 48.8 | 1.2 | 12 | 38 | 47.8 | 1.2 | 13 | 38 | 46.8 |
| 37 | 49.8 | 1.2 | 12 | 37 | 48.8 | 1.2 | 13 | 37 | 47.8 |
| 36 | 50.8 | 1.2 | 12 | 36 | 49.8 | 1.2 | 13 | 36 | 48.8 |
| 35 | 51.8 | 1.2 | 12 | 35 | 50.8 | 1.2 | 13 | 35 | 49.8 |
| 34 | 52.8 | 1.2 | 12 | 34 | 51.8 | 1.2 | 13 | 34 | 50.8 |
| 33 | 53.8 | 1.2 | 12 | 33 | 52.8 | 1.2 | 13 | 33 | 51.8 |
| 32 | 54.8 | 1.2 | 12 | 32 | 53.8 | 1.2 | 13 | 32 | 52.8 |
| 31 | 55.8 | 1.2 | 12 | 31 | 54.8 | 1.2 | 13 | 31 | 53.8 |
| 30 | 56.8 | 1.2 | 12 | 30 | 55.8 | 1.2 | 13 | 30 | 54.8 |
| 60 | 26.6 | 1.4 | 12 | 60 | 25.6 | 1.4 | 13 | 60 | 24.6 |
| 59 | 27.6 | 1.4 | 12 | 59 | 26.6 | 1.4 | 13 | 59 | 25.6 |
| 58 | 28.6 | 1.4 | 12 | 58 | 27.6 | 1.4 | 13 | 58 | 26.6 |
| 57 | 29.6 | 1.4 | 12 | 57 | 28.6 | 1.4 | 13 | 57 | 27.6 |
| 56 | 30.6 | 1.4 | 12 | 56 | 29.6 | 1.4 | 13 | 56 | 28.6 |
| 55 | 31.6 | 1.4 | 12 | 55 | 30.6 | 1.4 | 13 | 55 | 29.6 |
| 54 | 32.6 | 1.4 | 12 | 54 | 31.6 | 1.4 | 13 | 54 | 30.6 |
| 53 | 33.6 | 1.4 | 12 | 53 | 32.6 | 1.4 | 13 | 53 | 31.6 |
| 52 | 34.6 | 1.4 | 12 | 52 | 33.6 | 1.4 | 13 | 52 | 32.6 |
| 51 | 35.6 | 1.4 | 12 | 51 | 34.6 | 1.4 | 13 | 51 | 33.6 |
| 50 | 36.6 | 1.4 | 12 | 50 | 35.6 | 1.4 | 13 | 50 | 34.6 |
| 49 | 37.6 | 1.4 | 12 | 49 | 36.6 | 1.4 | 13 | 49 | 35.6 |
| 48 | 38.6 | 1.4 | 12 | 48 | 37.6 | 1.4 | 13 | 48 | 36.6 |
| 47 | 39.6 | 1.4 | 12 | 47 | 38.6 | 1.4 | 13 | 47 | 37.6 |
| 46 | 40.6 | 1.4 | 12 | 46 | 39.6 | 1.4 | 13 | 46 | 38.6 |
| 45 | 41.6 | 1.4 | 12 | 45 | 40.6 | 1.4 | 13 | 45 | 39.6 |
| 44 | 42.6 | 1.4 | 12 | 44 | 41.6 | 1.4 | 13 | 44 | 40.6 |
| 43 | 43.6 | 1.4 | 12 | 43 | 42.6 | 1.4 | 13 | 43 | 41.6 |
| 42 | 44.6 | 1.4 | 12 | 42 | 43.6 | 1.4 | 13 | 42 | 42.6 |
| 41 | 45.6 | 1.4 | 12 | 41 | 44.6 | 1.4 | 13 | 41 | 43.6 |
| 40 | 46.6 | 1.4 | 12 | 40 | 45.6 | 1.4 | 13 | 40 | 44.6 |
| 39 | 47.6 | 1.4 | 12 | 39 | 46.6 | 1.4 | 13 | 39 | 45.6 |
| 38 | 48.6 | 1.4 | 12 | 38 | 47.6 | 1.4 | 13 | 38 | 46.6 |
| 37 | 49.6 | 1.4 | 12 | 37 | 48.6 | 1.4 | 13 | 37 | 47.6 |
| 36 | 50.6 | 1.4 | 12 | 36 | 49.6 | 1.4 | 13 | 36 | 48.6 |
| 35 | 51.6 | 1.4 | 12 | 35 | 50.6 | 1.4 | 13 | 35 | 49.6 |
| 34 | 52.6 | 1.4 | 12 | 34 | 51.6 | 1.4 | 13 | 34 | 50.6 |
| 33 | 53.6 | 1.4 | 12 | 33 | 52.6 | 1.4 | 13 | 33 | 51.6 |
| 32 | 54.6 | 1.4 | 12 | 32 | 53.6 | 1.4 | 13 | 32 | 52.6 |
| 31 | 55.6 | 1.4 | 12 | 31 | 54.6 | 1.4 | 13 | 31 | 53.6 |
| 30 | 56.6 | 1.4 | 12 | 30 | 55.6 | 1.4 | 13 | 30 | 54.6 |
| 60 | 26.4 | 1.6 | 12 | 60 | 25.4 | 1.6 | 13 | 60 | 24.4 |
| 59 | 27.4 | 1.6 | 12 | 59 | 26.4 | 1.6 | 13 | 59 | 25.4 |
| 58 | 28.4 | 1.6 | 12 | 58 | 27.4 | 1.6 | 13 | 58 | 26.4 |
| 57 | 29.4 | 1.6 | 12 | 57 | 28.4 | 1.6 | 13 | 57 | 27.4 |
| 56 | 30.4 | 1.6 | 12 | 56 | 29.4 | 1.6 | 13 | 56 | 28.4 |
| 55 | 31.4 | 1.6 | 12 | 55 | 30.4 | 1.6 | 13 | 55 | 29.4 |
| 54 | 32.4 | 1.6 | 12 | 54 | 31.4 | 1.6 | 13 | 54 | 30.4 |
| 53 | 33.4 | 1.6 | 12 | 53 | 32.4 | 1.6 | 13 | 53 | 31.4 |
| 52 | 34.4 | 1.6 | 12 | 52 | 33.4 | 1.6 | 13 | 52 | 32.4 |
| 51 | 35.4 | 1.6 | 12 | 51 | 34.4 | 1.6 | 13 | 51 | 33.4 |
| 50 | 36.4 | 1.6 | 12 | 50 | 35.4 | 1.6 | 13 | 50 | 34.4 |
| 49 | 37.4 | 1.6 | 12 | 49 | 36.4 | 1.6 | 13 | 49 | 35.4 |
| 48 | 38.4 | 1.6 | 12 | 48 | 37.4 | 1.6 | 13 | 48 | 36.4 |
| 47 | 39.4 | 1.6 | 12 | 47 | 38.4 | 1.6 | 13 | 47 | 37.4 |
| 46 | 40.4 | 1.6 | 12 | 46 | 39.4 | 1.6 | 13 | 46 | 38.4 |
| 45 | 41.4 | 1.6 | 12 | 45 | 40.4 | 1.6 | 13 | 45 | 39.4 |
| 44 | 42.4 | 1.6 | 12 | 44 | 41.4 | 1.6 | 13 | 44 | 40.4 |
| 43 | 43.4 | 1.6 | 12 | 43 | 42.4 | 1.6 | 13 | 43 | 41.4 |
| 42 | 44.4 | 1.6 | 12 | 42 | 43.4 | 1.6 | 13 | 42 | 42.4 |
| 41 | 45.4 | 1.6 | 12 | 41 | 44.4 | 1.6 | 13 | 41 | 43.4 |
| 40 | 46.4 | 1.6 | 12 | 40 | 45.4 | 1.6 | 13 | 40 | 44.4 |
| 39 | 47.4 | 1.6 | 12 | 39 | 46.4 | 1.6 | 13 | 39 | 45.4 |
| 38 | 48.4 | 1.6 | 12 | 38 | 47.4 | 1.6 | 13 | 38 | 46.4 |
| 37 | 49.4 | 1.6 | 12 | 37 | 48.4 | 1.6 | 13 | 37 | 47.4 |
| 36 | 50.4 | 1.6 | 12 | 36 | 49.4 | 1.6 | 13 | 36 | 48.4 |
| 35 | 51.4 | 1.6 | 12 | 35 | 50.4 | 1.6 | 13 | 35 | 49.4 |
| 34 | 52.4 | 1.6 | 12 | 34 | 51.4 | 1.6 | 13 | 34 | 50.4 |
| 33 | 53.4 | 1.6 | 12 | 33 | 52.4 | 1.6 | 13 | 33 | 51.4 |
| 32 | 54.4 | 1.6 | 12 | 32 | 53.4 | 1.6 | 13 | 32 | 52.4 |
| 31 | 55.4 | 1.6 | 12 | 31 | 54.4 | 1.6 | 13 | 31 | 53.4 |
| 30 | 56.4 | 1.6 | 12 | 30 | 55.4 | 1.6 | 13 | 30 | 54.4 |
| 60 | 26.2 | 1.8 | 12 | 60 | 25.2 | 1.8 | 13 | 60 | 24.2 |
| 59 | 27.2 | 1.8 | 12 | 59 | 26.2 | 1.8 | 13 | 59 | 25.2 |
| 58 | 28.2 | 1.8 | 12 | 58 | 27.2 | 1.8 | 13 | 58 | 26.2 |
| 57 | 29.2 | 1.8 | 12 | 57 | 28.2 | 1.8 | 13 | 57 | 27.2 |
| 56 | 30.2 | 1.8 | 12 | 56 | 29.2 | 1.8 | 13 | 56 | 28.2 |
| 55 | 31.2 | 1.8 | 12 | 55 | 30.2 | 1.8 | 13 | 55 | 29.2 |
| 54 | 32.2 | 1.8 | 12 | 54 | 31.2 | 1.8 | 13 | 54 | 30.2 |
| 53 | 33.2 | 1.8 | 12 | 53 | 32.2 | 1.8 | 13 | 53 | 31.2 |
| 52 | 34.2 | 1.8 | 12 | 52 | 33.2 | 1.8 | 13 | 52 | 32.2 |
| 51 | 35.2 | 1.8 | 12 | 51 | 34.2 | 1.8 | 13 | 51 | 33.2 |
| 50 | 36.2 | 1.8 | 12 | 50 | 35.2 | 1.8 | 13 | 50 | 34.2 |
| 49 | 37.2 | 1.8 | 12 | 49 | 36.2 | 1.8 | 13 | 49 | 35.2 |
| 48 | 38.2 | 1.8 | 12 | 48 | 37.2 | 1.8 | 13 | 48 | 36.2 |
| 47 | 39.2 | 1.8 | 12 | 47 | 38.2 | 1.8 | 13 | 47 | 37.2 |
| 46 | 40.2 | 1.8 | 12 | 46 | 39.2 | 1.8 | 13 | 46 | 38.2 |
| 45 | 41.2 | 1.8 | 12 | 45 | 40.2 | 1.8 | 13 | 45 | 39.2 |
| 44 | 42.2 | 1.8 | 12 | 44 | 41.2 | 1.8 | 13 | 44 | 40.2 |
| 43 | 43.2 | 1.8 | 12 | 43 | 42.2 | 1.8 | 13 | 43 | 41.2 |
| 42 | 44.2 | 1.8 | 12 | 42 | 43.2 | 1.8 | 13 | 42 | 42.2 |
| 41 | 45.2 | 1.8 | 12 | 41 | 44.2 | 1.8 | 13 | 41 | 43.2 |
| 40 | 46.2 | 1.8 | 12 | 40 | 45.2 | 1.8 | 13 | 40 | 44.2 |
| 39 | 47.2 | 1.8 | 12 | 39 | 46.2 | 1.8 | 13 | 39 | 45.2 |
| 38 | 48.2 | 1.8 | 12 | 38 | 47.2 | 1.8 | 13 | 38 | 46.2 |
| 37 | 49.2 | 1.8 | 12 | 37 | 48.2 | 1.8 | 13 | 37 | 47.2 |
| 36 | 50.2 | 1.8 | 12 | 36 | 49.2 | 1.8 | 13 | 36 | 48.2 |
| 35 | 51.2 | 1.8 | 12 | 35 | 50.2 | 1.8 | 13 | 35 | 49.2 |
| 34 | 52.2 | 1.8 | 12 | 34 | 51.2 | 1.8 | 13 | 34 | 50.2 |
| 33 | 53.2 | 1.8 | 12 | 33 | 52.2 | 1.8 | 13 | 33 | 51.2 |
| 32 | 54.2 | 1.8 | 12 | 32 | 53.2 | 1.8 | 13 | 32 | 52.2 |
| 31 | 55.2 | 1.8 | 12 | 31 | 54.2 | 1.8 | 13 | 31 | 53.2 |
| 30 | 56.2 | 1.8 | 12 | 30 | 55.2 | 1.8 | 13 | 30 | 54.2 |
| 60 | 26 | 2 | 12 | 60 | 25 | 2 | 13 | 60 | 24 |
| 59 | 27 | 2 | 12 | 59 | 26 | 2 | 13 | 59 | 25 |
| 58 | 28 | 2 | 12 | 58 | 27 | 2 | 13 | 58 | 26 |
| 57 | 29 | 2 | 12 | 57 | 28 | 2 | 13 | 57 | 27 |
| 56 | 30 | 2 | 12 | 56 | 29 | 2 | 13 | 56 | 28 |
| 55 | 31 | 2 | 12 | 55 | 30 | 2 | 13 | 55 | 29 |
| 54 | 32 | 2 | 12 | 54 | 31 | 2 | 13 | 54 | 30 |
| 53 | 33 | 2 | 12 | 53 | 32 | 2 | 13 | 53 | 31 |
| 52 | 34 | 2 | 12 | 52 | 33 | 2 | 13 | 52 | 32 |
| 51 | 35 | 2 | 12 | 51 | 34 | 2 | 13 | 51 | 33 |
| 50 | 36 | 2 | 12 | 50 | 35 | 2 | 13 | 50 | 34 |
| 49 | 37 | 2 | 12 | 49 | 36 | 2 | 13 | 49 | 35 |
| 48 | 38 | 2 | 12 | 48 | 37 | 2 | 13 | 48 | 36 |
| 47 | 39 | 2 | 12 | 47 | 38 | 2 | 13 | 47 | 37 |
| 46 | 40 | 2 | 12 | 46 | 39 | 2 | 13 | 46 | 38 |
| 45 | 41 | 2 | 12 | 45 | 40 | 2 | 13 | 45 | 39 |
| 44 | 42 | 2 | 12 | 44 | 41 | 2 | 13 | 44 | 40 |
| 43 | 43 | 2 | 12 | 43 | 42 | 2 | 13 | 43 | 41 |
| 42 | 44 | 2 | 12 | 42 | 43 | 2 | 13 | 42 | 42 |
| 41 | 45 | 2 | 12 | 41 | 44 | 2 | 13 | 41 | 43 |
| 40 | 46 | 2 | 12 | 40 | 45 | 2 | 13 | 40 | 44 |
| 39 | 47 | 2 | 12 | 39 | 46 | 2 | 13 | 39 | 45 |
| 38 | 48 | 2 | 12 | 38 | 47 | 2 | 13 | 38 | 46 |
| 37 | 49 | 2 | 12 | 37 | 48 | 2 | 13 | 37 | 47 |
| 36 | 50 | 2 | 12 | 36 | 49 | 2 | 13 | 36 | 48 |
| 35 | 51 | 2 | 12 | 35 | 50 | 2 | 13 | 35 | 49 |
| 34 | 52 | 2 | 12 | 34 | 51 | 2 | 13 | 34 | 50 |
| 33 | 53 | 2 | 12 | 33 | 52 | 2 | 13 | 33 | 51 |
| 32 | 54 | 2 | 12 | 32 | 53 | 2 | 13 | 32 | 52 |
| 31 | 55 | 2 | 12 | 31 | 54 | 2 | 13 | 31 | 53 |
| 30 | 56 | 2 | 12 | 30 | 55 | 2 | 13 | 30 | 54 |
| 60 | 25.8 | 2.2 | 12 | 60 | 24.8 | 2.2 | 13 | 60 | 23.8 |
| 59 | 26.8 | 2.2 | 12 | 59 | 25.8 | 2.2 | 13 | 59 | 24.8 |
| 58 | 27.8 | 2.2 | 12 | 58 | 26.8 | 2.2 | 13 | 58 | 25.8 |
| 57 | 28.8 | 2.2 | 12 | 57 | 27.8 | 2.2 | 13 | 57 | 26.8 |
| 56 | 29.8 | 2.2 | 12 | 56 | 28.8 | 2.2 | 13 | 56 | 27.8 |
| 55 | 30.8 | 2.2 | 12 | 55 | 29.8 | 2.2 | 13 | 55 | 28.8 |
| 54 | 31.8 | 2.2 | 12 | 54 | 30.8 | 2.2 | 13 | 54 | 29.8 |
| 53 | 32.8 | 2.2 | 12 | 53 | 31.8 | 2.2 | 13 | 53 | 30.8 |
| 52 | 33.8 | 2.2 | 12 | 52 | 32.8 | 2.2 | 13 | 52 | 31.8 |
| 51 | 34.8 | 2.2 | 12 | 51 | 33.8 | 2.2 | 13 | 51 | 32.8 |
| 50 | 35.8 | 2.2 | 12 | 50 | 34.8 | 2.2 | 13 | 50 | 33.8 |
| 49 | 36.8 | 2.2 | 12 | 49 | 35.8 | 2.2 | 13 | 49 | 34.8 |
| 48 | 37.8 | 2.2 | 12 | 48 | 36.8 | 2.2 | 13 | 48 | 35.8 |
| 47 | 38.8 | 2.2 | 12 | 47 | 37.8 | 2.2 | 13 | 47 | 36.8 |
| 46 | 39.8 | 2.2 | 12 | 46 | 38.8 | 2.2 | 13 | 46 | 37.8 |
| 45 | 40.8 | 2.2 | 12 | 45 | 39.8 | 2.2 | 13 | 45 | 38.8 |
| 44 | 41.8 | 2.2 | 12 | 44 | 40.8 | 2.2 | 13 | 44 | 39.8 |
| 43 | 42.8 | 2.2 | 12 | 43 | 41.8 | 2.2 | 13 | 43 | 40.8 |
| 42 | 43.8 | 2.2 | 12 | 42 | 42.8 | 2.2 | 13 | 42 | 41.8 |
| 41 | 44.8 | 2.2 | 12 | 41 | 43.8 | 2.2 | 13 | 41 | 42.8 |
| 40 | 45.8 | 2.2 | 12 | 40 | 44.8 | 2.2 | 13 | 40 | 43.8 |
| 39 | 46.8 | 2.2 | 12 | 39 | 45.8 | 2.2 | 13 | 39 | 44.8 |
| 38 | 47.8 | 2.2 | 12 | 38 | 46.8 | 2.2 | 13 | 38 | 45.8 |
| 37 | 48.8 | 2.2 | 12 | 37 | 47.8 | 2.2 | 13 | 37 | 46.8 |
| 36 | 49.8 | 2.2 | 12 | 36 | 48.8 | 2.2 | 13 | 36 | 47.8 |
| 35 | 50.8 | 2.2 | 12 | 35 | 49.8 | 2.2 | 13 | 35 | 48.8 |
| 34 | 51.8 | 2.2 | 12 | 34 | 50.8 | 2.2 | 13 | 34 | 49.8 |
| 33 | 52.8 | 2.2 | 12 | 33 | 51.8 | 2.2 | 13 | 33 | 50.8 |
| 32 | 53.8 | 2.2 | 12 | 32 | 52.8 | 2.2 | 13 | 32 | 51.8 |
| 31 | 54.8 | 2.2 | 12 | 31 | 53.8 | 2.2 | 13 | 31 | 52.8 |
| 30 | 55.8 | 2.2 | 12 | 30 | 54.8 | 2.2 | 13 | 30 | 53.8 |
| 60 | 25.6 | 2.4 | 12 | 60 | 24.6 | 2.4 | 13 | 60 | 23.6 |
| 59 | 26.6 | 2.4 | 12 | 59 | 25.6 | 2.4 | 13 | 59 | 24.6 |
| 58 | 27.6 | 2.4 | 12 | 58 | 26.6 | 2.4 | 13 | 58 | 25.6 |
| 57 | 28.6 | 2.4 | 12 | 57 | 27.6 | 2.4 | 13 | 57 | 26.6 |
| 56 | 29.6 | 2.4 | 12 | 56 | 28.6 | 2.4 | 13 | 56 | 27.6 |
| 55 | 30.6 | 2.4 | 12 | 55 | 29.6 | 2.4 | 13 | 55 | 28.6 |
| 54 | 31.6 | 2.4 | 12 | 54 | 30.6 | 2.4 | 13 | 54 | 29.6 |
| 53 | 32.6 | 2.4 | 12 | 53 | 31.6 | 2.4 | 13 | 53 | 30.6 |
| 52 | 33.6 | 2.4 | 12 | 52 | 32.6 | 2.4 | 13 | 52 | 31.6 |
| 51 | 34.6 | 2.4 | 12 | 51 | 33.6 | 2.4 | 13 | 51 | 32.6 |
| 50 | 35.6 | 2.4 | 12 | 50 | 34.6 | 2.4 | 13 | 50 | 33.6 |
| 49 | 36.6 | 2.4 | 12 | 49 | 35.6 | 2.4 | 13 | 49 | 34.6 |
| 48 | 37.6 | 2.4 | 12 | 48 | 36.6 | 2.4 | 13 | 48 | 35.6 |
| 47 | 38.6 | 2.4 | 12 | 47 | 37.6 | 2.4 | 13 | 47 | 36.6 |
| 46 | 39.6 | 2.4 | 12 | 46 | 38.6 | 2.4 | 13 | 46 | 37.6 |
| 45 | 40.6 | 2.4 | 12 | 45 | 39.6 | 2.4 | 13 | 45 | 38.6 |
| 44 | 41.6 | 2.4 | 12 | 44 | 40.6 | 2.4 | 13 | 44 | 39.6 |
| 43 | 42.6 | 2.4 | 12 | 43 | 41.6 | 2.4 | 13 | 43 | 40.6 |
| 42 | 43.6 | 2.4 | 12 | 42 | 42.6 | 2.4 | 13 | 42 | 41.6 |
| 41 | 44.6 | 2.4 | 12 | 41 | 43.6 | 2.4 | 13 | 41 | 42.6 |
| 40 | 45.6 | 2.4 | 12 | 40 | 44.6 | 2.4 | 13 | 40 | 43.6 |
| 39 | 46.6 | 2.4 | 12 | 39 | 45.6 | 2.4 | 13 | 39 | 44.6 |
| 38 | 47.6 | 2.4 | 12 | 38 | 46.6 | 2.4 | 13 | 38 | 45.6 |
| 37 | 48.6 | 2.4 | 12 | 37 | 47.6 | 2.4 | 13 | 37 | 46.6 |
| 36 | 49.6 | 2.4 | 12 | 36 | 48.6 | 2.4 | 13 | 36 | 47.6 |
| 35 | 50.6 | 2.4 | 12 | 35 | 49.6 | 2.4 | 13 | 35 | 48.6 |
| 34 | 51.6 | 2.4 | 12 | 34 | 50.6 | 2.4 | 13 | 34 | 49.6 |
| 33 | 52.6 | 2.4 | 12 | 33 | 51.6 | 2.4 | 13 | 33 | 50.6 |
| 32 | 53.6 | 2.4 | 12 | 32 | 52.6 | 2.4 | 13 | 32 | 51.6 |
| 31 | 54.6 | 2.4 | 12 | 31 | 53.6 | 2.4 | 13 | 31 | 52.6 |
| 30 | 55.6 | 2.4 | 12 | 30 | 54.6 | 2.4 | 13 | 30 | 53.6 |
| 60 | 25.4 | 2.6 | 12 | 60 | 24.4 | 2.6 | 13 | 60 | 23.4 |
| 59 | 26.4 | 2.6 | 12 | 59 | 25.4 | 2.6 | 13 | 59 | 24.4 |
| 58 | 27.4 | 2.6 | 12 | 58 | 26.4 | 2.6 | 13 | 58 | 25.4 |
| 57 | 28.4 | 2.6 | 12 | 57 | 27.4 | 2.6 | 13 | 57 | 26.4 |
| 56 | 29.4 | 2.6 | 12 | 56 | 28.4 | 2.6 | 13 | 56 | 27.4 |
| 55 | 30.4 | 2.6 | 12 | 55 | 29.4 | 2.6 | 13 | 55 | 28.4 |
| 54 | 31.4 | 2.6 | 12 | 54 | 30.4 | 2.6 | 13 | 54 | 29.4 |
| 53 | 32.4 | 2.6 | 12 | 53 | 31.4 | 2.6 | 13 | 53 | 30.4 |
| 52 | 33.4 | 2.6 | 12 | 52 | 32.4 | 2.6 | 13 | 52 | 31.4 |
| 51 | 34.4 | 2.6 | 12 | 51 | 33.4 | 2.6 | 13 | 51 | 32.4 |
| 50 | 35.4 | 2.6 | 12 | 50 | 34.4 | 2.6 | 13 | 50 | 33.4 |
| 49 | 36.4 | 2.6 | 12 | 49 | 35.4 | 2.6 | 13 | 49 | 34.4 |
| 48 | 37.4 | 2.6 | 12 | 48 | 36.4 | 2.6 | 13 | 48 | 35.4 |
| 47 | 38.4 | 2.6 | 12 | 47 | 37.4 | 2.6 | 13 | 47 | 36.4 |
| 46 | 39.4 | 2.6 | 12 | 46 | 38.4 | 2.6 | 13 | 46 | 37.4 |
| 45 | 40.4 | 2.6 | 12 | 45 | 39.4 | 2.6 | 13 | 45 | 38.4 |
| 44 | 41.4 | 2.6 | 12 | 44 | 40.4 | 2.6 | 13 | 44 | 39.4 |
| 43 | 42.4 | 2.6 | 12 | 43 | 41.4 | 2.6 | 13 | 43 | 40.4 |
| 42 | 43.4 | 2.6 | 12 | 42 | 42.4 | 2.6 | 13 | 42 | 41.4 |
| 41 | 44.4 | 2.6 | 12 | 41 | 43.4 | 2.6 | 13 | 41 | 42.4 |
| 40 | 45.4 | 2.6 | 12 | 40 | 44.4 | 2.6 | 13 | 40 | 43.4 |
| 39 | 46.4 | 2.6 | 12 | 39 | 45.4 | 2.6 | 13 | 39 | 44.4 |
| 38 | 47.4 | 2.6 | 12 | 38 | 46.4 | 2.6 | 13 | 38 | 45.4 |
| 37 | 48.4 | 2.6 | 12 | 37 | 47.4 | 2.6 | 13 | 37 | 46.4 |
| 36 | 49.4 | 2.6 | 12 | 36 | 48.4 | 2.6 | 13 | 36 | 47.4 |
| 35 | 50.4 | 2.6 | 12 | 35 | 49.4 | 2.6 | 13 | 35 | 48.4 |
| 34 | 51.4 | 2.6 | 12 | 34 | 50.4 | 2.6 | 13 | 34 | 49.4 |
| 33 | 52.4 | 2.6 | 12 | 33 | 51.4 | 2.6 | 13 | 33 | 50.4 |
| 32 | 53.4 | 2.6 | 12 | 32 | 52.4 | 2.6 | 13 | 32 | 51.4 |
| 31 | 54.4 | 2.6 | 12 | 31 | 53.4 | 2.6 | 13 | 31 | 52.4 |
| 30 | 55.4 | 2.6 | 12 | 30 | 54.4 | 2.6 | 13 | 30 | 53.4 |
| 60 | 25.2 | 2.8 | 12 | 60 | 24.2 | 2.8 | 13 | 60 | 23.2 |
| 59 | 26.2 | 2.8 | 12 | 59 | 25.2 | 2.8 | 13 | 59 | 24.2 |
| 58 | 27.2 | 2.8 | 12 | 58 | 26.2 | 2.8 | 13 | 58 | 25.2 |
| 57 | 28.2 | 2.8 | 12 | 57 | 27.2 | 2.8 | 13 | 57 | 26.2 |
| 56 | 29.2 | 2.8 | 12 | 56 | 28.2 | 2.8 | 13 | 56 | 27.2 |
| 55 | 30.2 | 2.8 | 12 | 55 | 29.2 | 2.8 | 13 | 55 | 28.2 |
| 54 | 31.2 | 2.8 | 12 | 54 | 30.2 | 2.8 | 13 | 54 | 29.2 |
| 53 | 32.2 | 2.8 | 12 | 53 | 31.2 | 2.8 | 13 | 53 | 30.2 |
| 52 | 33.2 | 2.8 | 12 | 52 | 32.2 | 2.8 | 13 | 52 | 31.2 |
| 51 | 34.2 | 2.8 | 12 | 51 | 33.2 | 2.8 | 13 | 51 | 32.2 |
| 50 | 35.2 | 2.8 | 12 | 50 | 34.2 | 2.8 | 13 | 50 | 33.2 |
| 49 | 36.2 | 2.8 | 12 | 49 | 35.2 | 2.8 | 13 | 49 | 34.2 |
| 48 | 37.2 | 2.8 | 12 | 48 | 36.2 | 2.8 | 13 | 48 | 35.2 |
| 47 | 38.2 | 2.8 | 12 | 47 | 37.2 | 2.8 | 13 | 47 | 36.2 |
| 46 | 39.2 | 2.8 | 12 | 46 | 38.2 | 2.8 | 13 | 46 | 37.2 |
| 45 | 40.2 | 2.8 | 12 | 45 | 39.2 | 2.8 | 13 | 45 | 38.2 |
| 44 | 41.2 | 2.8 | 12 | 44 | 40.2 | 2.8 | 13 | 44 | 39.2 |
| 43 | 42.2 | 2.8 | 12 | 43 | 41.2 | 2.8 | 13 | 43 | 40.2 |
| 42 | 43.2 | 2.8 | 12 | 42 | 42.2 | 2.8 | 13 | 42 | 41.2 |
| 41 | 44.2 | 2.8 | 12 | 41 | 43.2 | 2.8 | 13 | 41 | 42.2 |
| 40 | 45.2 | 2.8 | 12 | 40 | 44.2 | 2.8 | 13 | 40 | 43.2 |
| 39 | 46.2 | 2.8 | 12 | 39 | 45.2 | 2.8 | 13 | 39 | 44.2 |
| 38 | 47.2 | 2.8 | 12 | 38 | 46.2 | 2.8 | 13 | 38 | 45.2 |
| 37 | 48.2 | 2.8 | 12 | 37 | 47.2 | 2.8 | 13 | 37 | 46.2 |
| 36 | 49.2 | 2.8 | 12 | 36 | 48.2 | 2.8 | 13 | 36 | 47.2 |
| 35 | 50.2 | 2.8 | 12 | 35 | 49.2 | 2.8 | 13 | 35 | 48.2 |
| 34 | 51.2 | 2.8 | 12 | 34 | 50.2 | 2.8 | 13 | 34 | 49.2 |
| 33 | 52.2 | 2.8 | 12 | 33 | 51.2 | 2.8 | 13 | 33 | 50.2 |
| 32 | 53.2 | 2.8 | 12 | 32 | 52.2 | 2.8 | 13 | 32 | 51.2 |
| 31 | 54.2 | 2.8 | 12 | 31 | 53.2 | 2.8 | 13 | 31 | 52.2 |
| 30 | 55.2 | 2.8 | 12 | 30 | 54.2 | 2.8 | 13 | 30 | 53.2 |
| 60 | 25 | 3 | 12 | 60 | 24 | 3 | 13 | 60 | 23 |
| 59 | 26 | 3 | 12 | 59 | 25 | 3 | 13 | 59 | 24 |
| 58 | 27 | 3 | 12 | 58 | 26 | 3 | 13 | 58 | 25 |
| 57 | 28 | 3 | 12 | 57 | 27 | 3 | 13 | 57 | 26 |
| 56 | 29 | 3 | 12 | 56 | 28 | 3 | 13 | 56 | 27 |
| 55 | 30 | 3 | 12 | 55 | 29 | 3 | 13 | 55 | 28 |
| 54 | 31 | 3 | 12 | 54 | 30 | 3 | 13 | 54 | 29 |
| 53 | 32 | 3 | 12 | 53 | 31 | 3 | 13 | 53 | 30 |
| 52 | 33 | 3 | 12 | 52 | 32 | 3 | 13 | 52 | 31 |
| 51 | 34 | 3 | 12 | 51 | 33 | 3 | 13 | 51 | 32 |
| 50 | 35 | 3 | 12 | 50 | 34 | 3 | 13 | 50 | 33 |
| 49 | 36 | 3 | 12 | 49 | 35 | 3 | 13 | 49 | 34 |
| 48 | 37 | 3 | 12 | 48 | 36 | 3 | 13 | 48 | 35 |
| 47 | 38 | 3 | 12 | 47 | 37 | 3 | 13 | 47 | 36 |
| 46 | 39 | 3 | 12 | 46 | 38 | 3 | 13 | 46 | 37 |
| 45 | 40 | 3 | 12 | 45 | 39 | 3 | 13 | 45 | 38 |
| 44 | 41 | 3 | 12 | 44 | 40 | 3 | 13 | 44 | 39 |
| 43 | 42 | 3 | 12 | 43 | 41 | 3 | 13 | 43 | 40 |
| 42 | 43 | 3 | 12 | 42 | 42 | 3 | 13 | 42 | 41 |
| 41 | 44 | 3 | 12 | 41 | 43 | 3 | 13 | 41 | 42 |
| 40 | 45 | 3 | 12 | 40 | 44 | 3 | 13 | 40 | 43 |
| 39 | 46 | 3 | 12 | 39 | 45 | 3 | 13 | 39 | 44 |
| 38 | 47 | 3 | 12 | 38 | 46 | 3 | 13 | 38 | 45 |
| 37 | 48 | 3 | 12 | 37 | 47 | 3 | 13 | 37 | 46 |
| 36 | 49 | 3 | 12 | 36 | 48 | 3 | 13 | 36 | 47 |
| 35 | 50 | 3 | 12 | 35 | 49 | 3 | 13 | 35 | 48 |
| 34 | 51 | 3 | 12 | 34 | 50 | 3 | 13 | 34 | 49 |
| 33 | 52 | 3 | 12 | 33 | 51 | 3 | 13 | 33 | 50 |
| 32 | 53 | 3 | 12 | 32 | 52 | 3 | 13 | 32 | 51 |
| 31 | 54 | 3 | 12 | 31 | 53 | 3 | 13 | 31 | 52 |
| 30 | 55 | 3 | 12 | 30 | 54 | 3 | 13 | 30 | 53 |

| | second | | | | second |
|---|---|---|---|---|---|
| polymer- | lipid | | | polymer- | lipid |
| conjugated | (i.e | first | | conjugated | (i.e |
| lipid | anionic, | lipid | | lipid | anionic, |
| (i.e. | neutral, | (i.e. | | (i.e. | neutral, |
| PEG- | or | cation- | sterol | PEG- | or |
| conjugated | zwitterionic | ionizable | (i.e. | conjugated | zwitterionic |
| lipid) | lipid) | lipid | cholesterol | lipid) | lipid) |
| (mole %) | (mole %) | (mole %) | (mole %) | (mole %) | (mole %) |
| 1 | 2 | 60 | 36 | 1 | 3 |
| 1 | 2 | 59 | 37 | 1 | 3 |
| 1 | 2 | 58 | 38 | 1 | 3 |
| 1 | 2 | 57 | 39 | 1 | 3 |
| 1 | 2 | 56 | 40 | 1 | 3 |
| 1 | 2 | 55 | 41 | 1 | 3 |
| 1 | 2 | 54 | 42 | 1 | 3 |
| 1 | 2 | 53 | 43 | 1 | 3 |
| 1 | 2 | 52 | 44 | 1 | 3 |
| 1 | 2 | 51 | 45 | 1 | 3 |
| 1 | 2 | 50 | 46 | 1 | 3 |
| 1 | 2 | 49 | 47 | 1 | 3 |
| 1 | 2 | 48 | 48 | 1 | 3 |
| 1 | 2 | 47 | 49 | 1 | 3 |
| 1 | 2 | 46 | 50 | 1 | 3 |
| 1 | 2 | 45 | 51 | 1 | 3 |
| 1 | 2 | 44 | 52 | 1 | 3 |
| 1 | 2 | 43 | 53 | 1 | 3 |
| 1 | 2 | 42 | 54 | 1 | 3 |
| 1 | 2 | 41 | 55 | 1 | 3 |
| 1 | 2 | 40 | 56 | 1 | 3 |
| 1 | 2 | 39 | 57 | 1 | 3 |
| 1 | 2 | 38 | 58 | 1 | 3 |
| 1 | 2 | 37 | 59 | 1 | 3 |
| 1 | 2 | 36 | 60 | 1 | 3 |
| 1 | 2 | 35 | 61 | 1 | 3 |
| 1 | 2 | 34 | 62 | 1 | 3 |
| 1 | 2 | 33 | 63 | 1 | 3 |
| 1 | 2 | 32 | 64 | 1 | 3 |
| 1 | 2 | 31 | 65 | 1 | 3 |
| 1 | 2 | 30 | 66 | 1 | 3 |
| 1.2 | 2 | 60 | 35.8 | 1.2 | 3 |
| 1.2 | 2 | 59 | 36.8 | 1.2 | 3 |
| 1.2 | 2 | 58 | 37.8 | 1.2 | 3 |
| 1.2 | 2 | 57 | 38.8 | 1.2 | 3 |
| 1.2 | 2 | 56 | 39.8 | 1.2 | 3 |
| 1.2 | 2 | 55 | 40.8 | 1.2 | 3 |
| 1.2 | 2 | 54 | 41.8 | 1.2 | 3 |
| 1.2 | 2 | 53 | 42.8 | 1.2 | 3 |
| 1.2 | 2 | 52 | 43.8 | 1.2 | 3 |
| 1.2 | 2 | 51 | 44.8 | 1.2 | 3 |
| 1.2 | 2 | 50 | 45.8 | 1.2 | 3 |
| 1.2 | 2 | 49 | 46.8 | 1.2 | 3 |
| 1.2 | 2 | 48 | 47.8 | 1.2 | 3 |
| 1.2 | 2 | 47 | 48.8 | 1.2 | 3 |
| 1.2 | 2 | 46 | 49.8 | 1.2 | 3 |
| 1.2 | 2 | 45 | 50.8 | 1.2 | 3 |
| 1.2 | 2 | 44 | 51.8 | 1.2 | 3 |
| 1.2 | 2 | 43 | 52.8 | 1.2 | 3 |
| 1.2 | 2 | 42 | 53.8 | 1.2 | 3 |
| 1.2 | 2 | 41 | 54.8 | 1.2 | 3 |
| 1.2 | 2 | 40 | 55.8 | 1.2 | 3 |
| 1.2 | 2 | 39 | 56.8 | 1.2 | 3 |
| 1.2 | 2 | 38 | 57.8 | 1.2 | 3 |
| 1.2 | 2 | 37 | 58.8 | 1.2 | 3 |
| 1.2 | 2 | 36 | 59.8 | 1.2 | 3 |
| 1.2 | 2 | 35 | 60.8 | 1.2 | 3 |
| 1.2 | 2 | 34 | 61.8 | 1.2 | 3 |
| 1.2 | 2 | 33 | 62.8 | 1.2 | 3 |
| 1.2 | 2 | 32 | 63.8 | 1.2 | 3 |
| 1.2 | 2 | 31 | 64.8 | 1.2 | 3 |
| 1.2 | 2 | 30 | 65.8 | 1.2 | 3 |
| 1.4 | 2 | 60 | 35.6 | 1.4 | 3 |
| 1.4 | 2 | 59 | 36.6 | 1.4 | 3 |
| 1.4 | 2 | 58 | 37.6 | 1.4 | 3 |
| 1.4 | 2 | 57 | 38.6 | 1.4 | 3 |
| 1.4 | 2 | 56 | 39.6 | 1.4 | 3 |
| 1.4 | 2 | 55 | 40.6 | 1.4 | 3 |
| 1.4 | 2 | 54 | 41.6 | 1.4 | 3 |
| 1.4 | 2 | 53 | 42.6 | 1.4 | 3 |
| 1.4 | 2 | 52 | 43.6 | 1.4 | 3 |
| 1.4 | 2 | 51 | 44.6 | 1.4 | 3 |
| 1.4 | 2 | 50 | 45.6 | 1.4 | 3 |
| 1.4 | 2 | 49 | 46.6 | 1.4 | 3 |
| 1.4 | 2 | 48 | 47.6 | 1.4 | 3 |
| 1.4 | 2 | 47 | 48.6 | 1.4 | 3 |
| 1.4 | 2 | 46 | 49.6 | 1.4 | 3 |
| 1.4 | 2 | 45 | 50.6 | 1.4 | 3 |
| 1.4 | 2 | 44 | 51.6 | 1.4 | 3 |
| 1.4 | 2 | 43 | 52.6 | 1.4 | 3 |
| 1.4 | 2 | 42 | 53.6 | 1.4 | 3 |
| 1.4 | 2 | 41 | 54.6 | 1.4 | 3 |
| 1.4 | 2 | 40 | 55.6 | 1.4 | 3 |
| 1.4 | 2 | 39 | 56.6 | 1.4 | 3 |
| 1.4 | 2 | 38 | 57.6 | 1.4 | 3 |
| 1.4 | 2 | 37 | 58.6 | 1.4 | 3 |
| 1.4 | 2 | 36 | 59.6 | 1.4 | 3 |
| 1.4 | 2 | 35 | 60.6 | 1.4 | 3 |
| 1.4 | 2 | 34 | 61.6 | 1.4 | 3 |
| 1.4 | 2 | 33 | 62.6 | 1.4 | 3 |
| 1.4 | 2 | 32 | 63.6 | 1.4 | 3 |
| 1.4 | 2 | 31 | 64.6 | 1.4 | 3 |
| 1.4 | 2 | 30 | 65.6 | 1.4 | 3 |
| 1.6 | 2 | 60 | 35.4 | 1.6 | 3 |
| 1.6 | 2 | 59 | 36.4 | 1.6 | 3 |
| 1.6 | 2 | 58 | 37.4 | 1.6 | 3 |
| 1.6 | 2 | 57 | 38.4 | 1.6 | 3 |
| 1.6 | 2 | 56 | 39.4 | 1.6 | 3 |
| 1.6 | 2 | 55 | 40.4 | 1.6 | 3 |
| 1.6 | 2 | 54 | 41.4 | 1.6 | 3 |
| 1.6 | 2 | 53 | 42.4 | 1.6 | 3 |
| 1.6 | 2 | 52 | 43.4 | 1.6 | 3 |
| 1.6 | 2 | 51 | 44.4 | 1.6 | 3 |
| 1.6 | 2 | 50 | 45.4 | 1.6 | 3 |
| 1.6 | 2 | 49 | 46.4 | 1.6 | 3 |
| 1.6 | 2 | 48 | 47.4 | 1.6 | 3 |
| 1.6 | 2 | 47 | 48.4 | 1.6 | 3 |
| 1.6 | 2 | 46 | 49.4 | 1.6 | 3 |
| 1.6 | 2 | 45 | 50.4 | 1.6 | 3 |
| 1.6 | 2 | 44 | 51.4 | 1.6 | 3 |
| 1.6 | 2 | 43 | 52.4 | 1.6 | 3 |
| 1.6 | 2 | 42 | 53.4 | 1.6 | 3 |
| 1.6 | 2 | 41 | 54.4 | 1.6 | 3 |
| 1.6 | 2 | 40 | 55.4 | 1.6 | 3 |
| 1.6 | 2 | 39 | 56.4 | 1.6 | 3 |
| 1.6 | 2 | 38 | 57.4 | 1.6 | 3 |
| 1.6 | 2 | 37 | 58.4 | 1.6 | 3 |
| 1.6 | 2 | 36 | 59.4 | 1.6 | 3 |
| 1.6 | 2 | 35 | 60.4 | 1.6 | 3 |
| 1.6 | 2 | 34 | 61.4 | 1.6 | 3 |
| 1.6 | 2 | 33 | 62.4 | 1.6 | 3 |
| 1.6 | 2 | 32 | 63.4 | 1.6 | 3 |
| 1.6 | 2 | 31 | 64.4 | 1.6 | 3 |
| 1.6 | 2 | 30 | 65.4 | 1.6 | 3 |
| 1.8 | 2 | 60 | 35.2 | 1.8 | 3 |
| 1.8 | 2 | 59 | 36.2 | 1.8 | 3 |
| 1.8 | 2 | 58 | 37.2 | 1.8 | 3 |
| 1.8 | 2 | 57 | 38.2 | 1.8 | 3 |
| 1.8 | 2 | 56 | 39.2 | 1.8 | 3 |
| 1.8 | 2 | 55 | 40.2 | 1.8 | 3 |
| 1.8 | 2 | 54 | 41.2 | 1.8 | 3 |
| 1.8 | 2 | 53 | 42.2 | 1.8 | 3 |
| 1.8 | 2 | 52 | 43.2 | 1.8 | 3 |
| 1.8 | 2 | 51 | 44.2 | 1.8 | 3 |
| 1.8 | 2 | 50 | 45.2 | 1.8 | 3 |
| 1.8 | 2 | 49 | 46.2 | 1.8 | 3 |
| 1.8 | 2 | 48 | 47.2 | 1.8 | 3 |
| 1.8 | 2 | 47 | 48.2 | 1.8 | 3 |
| 1.8 | 2 | 46 | 49.2 | 1.8 | 3 |
| 1.8 | 2 | 45 | 50.2 | 1.8 | 3 |
| 1.8 | 2 | 44 | 51.2 | 1.8 | 3 |
| 1.8 | 2 | 43 | 52.2 | 1.8 | 3 |
| 1.8 | 2 | 42 | 53.2 | 1.8 | 3 |
| 1.8 | 2 | 41 | 54.2 | 1.8 | 3 |
| 1.8 | 2 | 40 | 55.2 | 1.8 | 3 |
| 1.8 | 2 | 39 | 56.2 | 1.8 | 3 |
| 1.8 | 2 | 38 | 57.2 | 1.8 | 3 |
| 1.8 | 2 | 37 | 58.2 | 1.8 | 3 |
| 1.8 | 2 | 36 | 59.2 | 1.8 | 3 |
| 1.8 | 2 | 35 | 60.2 | 1.8 | 3 |
| 1.8 | 2 | 34 | 61.2 | 1.8 | 3 |
| 1.8 | 2 | 33 | 62.2 | 1.8 | 3 |
| 1.8 | 2 | 32 | 63.2 | 1.8 | 3 |
| 1.8 | 2 | 31 | 64.2 | 1.8 | 3 |
| 1.8 | 2 | 30 | 65.2 | 1.8 | 3 |
| 2 | 2 | 60 | 35 | 2 | 3 |
| 2 | 2 | 59 | 36 | 2 | 3 |
| 2 | 2 | 58 | 37 | 2 | 3 |
| 2 | 2 | 57 | 38 | 2 | 3 |
| 2 | 2 | 56 | 39 | 2 | 3 |
| 2 | 2 | 55 | 40 | 2 | 3 |
| 2 | 2 | 54 | 41 | 2 | 3 |
| 2 | 2 | 53 | 42 | 2 | 3 |
| 2 | 2 | 52 | 43 | 2 | 3 |
| 2 | 2 | 51 | 44 | 2 | 3 |
| 2 | 2 | 50 | 45 | 2 | 3 |
| 2 | 2 | 49 | 46 | 2 | 3 |
| 2 | 2 | 48 | 47 | 2 | 3 |
| 2 | 2 | 47 | 48 | 2 | 3 |
| 2 | 2 | 46 | 49 | 2 | 3 |
| 2 | 2 | 45 | 50 | 2 | 3 |
| 2 | 2 | 44 | 51 | 2 | 3 |
| 2 | 2 | 43 | 52 | 2 | 3 |
| 2 | 2 | 42 | 53 | 2 | 3 |
| 2 | 2 | 41 | 54 | 2 | 3 |
| 2 | 2 | 40 | 55 | 2 | 3 |
| 2 | 2 | 39 | 56 | 2 | 3 |
| 2 | 2 | 38 | 57 | 2 | 3 |
| 2 | 2 | 37 | 58 | 2 | 3 |
| 2 | 2 | 36 | 59 | 2 | 3 |
| 2 | 2 | 35 | 60 | 2 | 3 |
| 2 | 2 | 34 | 61 | 2 | 3 |
| 2 | 2 | 33 | 62 | 2 | 3 |
| 2 | 2 | 32 | 63 | 2 | 3 |
| 2 | 2 | 31 | 64 | 2 | 3 |
| 2 | 2 | 30 | 65 | 2 | 3 |
| 2.2 | 2 | 60 | 34.8 | 2.2 | 3 |
| 2.2 | 2 | 59 | 35.8 | 2.2 | 3 |
| 2.2 | 2 | 58 | 36.8 | 2.2 | 3 |
| 2.2 | 2 | 57 | 37.8 | 2.2 | 3 |
| 2.2 | 2 | 56 | 38.8 | 2.2 | 3 |
| 2.2 | 2 | 55 | 39.8 | 2.2 | 3 |
| 2.2 | 2 | 54 | 40.8 | 2.2 | 3 |
| 2.2 | 2 | 53 | 41.8 | 2.2 | 3 |
| 2.2 | 2 | 52 | 42.8 | 2.2 | 3 |
| 2.2 | 2 | 51 | 43.8 | 2.2 | 3 |
| 2.2 | 2 | 50 | 44.8 | 2.2 | 3 |
| 2.2 | 2 | 49 | 45.8 | 2.2 | 3 |
| 2.2 | 2 | 48 | 46.8 | 2.2 | 3 |
| 2.2 | 2 | 47 | 47.8 | 2.2 | 3 |
| 2.2 | 2 | 46 | 48.8 | 2.2 | 3 |
| 2.2 | 2 | 45 | 49.8 | 2.2 | 3 |
| 2.2 | 2 | 44 | 50.8 | 2.2 | 3 |
| 2.2 | 2 | 43 | 51.8 | 2.2 | 3 |
| 2.2 | 2 | 42 | 52.8 | 2.2 | 3 |
| 2.2 | 2 | 41 | 53.8 | 2.2 | 3 |
| 2.2 | 2 | 40 | 54.8 | 2.2 | 3 |
| 2.2 | 2 | 39 | 55.8 | 2.2 | 3 |
| 2.2 | 2 | 38 | 56.8 | 2.2 | 3 |
| 2.2 | 2 | 37 | 57.8 | 2.2 | 3 |
| 2.2 | 2 | 36 | 58.8 | 2.2 | 3 |
| 2.2 | 2 | 35 | 59.8 | 2.2 | 3 |
| 2.2 | 2 | 34 | 60.8 | 2.2 | 3 |
| 2.2 | 2 | 33 | 61.8 | 2.2 | 3 |
| 2.2 | 2 | 32 | 62.8 | 2.2 | 3 |
| 2.2 | 2 | 31 | 63.8 | 2.2 | 3 |
| 2.2 | 2 | 30 | 64.8 | 2.2 | 3 |
| 2.4 | 2 | 60 | 34.6 | 2.4 | 3 |
| 2.4 | 2 | 59 | 35.6 | 2.4 | 3 |
| 2.4 | 2 | 58 | 36.6 | 2.4 | 3 |
| 2.4 | 2 | 57 | 37.6 | 2.4 | 3 |
| 2.4 | 2 | 56 | 38.6 | 2.4 | 3 |
| 2.4 | 2 | 55 | 39.6 | 2.4 | 3 |
| 2.4 | 2 | 54 | 40.6 | 2.4 | 3 |
| 2.4 | 2 | 53 | 41.6 | 2.4 | 3 |
| 2.4 | 2 | 52 | 42.6 | 2.4 | 3 |
| 2.4 | 2 | 51 | 43.6 | 2.4 | 3 |
| 2.4 | 2 | 50 | 44.6 | 2.4 | 3 |
| 2.4 | 2 | 49 | 45.6 | 2.4 | 3 |
| 2.4 | 2 | 48 | 46.6 | 2.4 | 3 |
| 2.4 | 2 | 47 | 47.6 | 2.4 | 3 |
| 2.4 | 2 | 46 | 48.6 | 2.4 | 3 |
| 2.4 | 2 | 45 | 49.6 | 2.4 | 3 |
| 2.4 | 2 | 44 | 50.6 | 2.4 | 3 |
| 2.4 | 2 | 43 | 51.6 | 2.4 | 3 |
| 2.4 | 2 | 42 | 52.6 | 2.4 | 3 |
| 2.4 | 2 | 41 | 53.6 | 2.4 | 3 |
| 2.4 | 2 | 40 | 54.6 | 2.4 | 3 |
| 2.4 | 2 | 39 | 55.6 | 2.4 | 3 |
| 2.4 | 2 | 38 | 56.6 | 2.4 | 3 |
| 2.4 | 2 | 37 | 57.6 | 2.4 | 3 |
| 2.4 | 2 | 36 | 58.6 | 2.4 | 3 |
| 2.4 | 2 | 35 | 59.6 | 2.4 | 3 |
| 2.4 | 2 | 34 | 60.6 | 2.4 | 3 |
| 2.4 | 2 | 33 | 61.6 | 2.4 | 3 |
| 2.4 | 2 | 32 | 62.6 | 2.4 | 3 |
| 2.4 | 2 | 31 | 63.6 | 2.4 | 3 |
| 2.4 | 2 | 30 | 64.6 | 2.4 | 3 |
| 2.6 | 2 | 60 | 34.4 | 2.6 | 3 |
| 2.6 | 2 | 59 | 35.4 | 2.6 | 3 |
| 2.6 | 2 | 58 | 36.4 | 2.6 | 3 |
| 2.6 | 2 | 57 | 37.4 | 2.6 | 3 |
| 2.6 | 2 | 56 | 38.4 | 2.6 | 3 |
| 2.6 | 2 | 55 | 39.4 | 2.6 | 3 |
| 2.6 | 2 | 54 | 40.4 | 2.6 | 3 |
| 2.6 | 2 | 53 | 41.4 | 2.6 | 3 |
| 2.6 | 2 | 52 | 42.4 | 2.6 | 3 |
| 2.6 | 2 | 51 | 43.4 | 2.6 | 3 |
| 2.6 | 2 | 50 | 44.4 | 2.6 | 3 |
| 2.6 | 2 | 49 | 45.4 | 2.6 | 3 |
| 2.6 | 2 | 48 | 46.4 | 2.6 | 3 |
| 2.6 | 2 | 47 | 47.4 | 2.6 | 3 |
| 2.6 | 2 | 46 | 48.4 | 2.6 | 3 |
| 2.6 | 2 | 45 | 49.4 | 2.6 | 3 |
| 2.6 | 2 | 44 | 50.4 | 2.6 | 3 |
| 2.6 | 2 | 43 | 51.4 | 2.6 | 3 |
| 2.6 | 2 | 42 | 52.4 | 2.6 | 3 |
| 2.6 | 2 | 41 | 53.4 | 2.6 | 3 |
| 2.6 | 2 | 40 | 54.4 | 2.6 | 3 |
| 2.6 | 2 | 39 | 55.4 | 2.6 | 3 |
| 2.6 | 2 | 38 | 56.4 | 2.6 | 3 |
| 2.6 | 2 | 37 | 57.4 | 2.6 | 3 |
| 2.6 | 2 | 36 | 58.4 | 2.6 | 3 |
| 2.6 | 2 | 35 | 59.4 | 2.6 | 3 |
| 2.6 | 2 | 34 | 60.4 | 2.6 | 3 |
| 2.6 | 2 | 33 | 61.4 | 2.6 | 3 |
| 2.6 | 2 | 32 | 62.4 | 2.6 | 3 |
| 2.6 | 2 | 31 | 63.4 | 2.6 | 3 |
| 2.6 | 2 | 30 | 64.4 | 2.6 | 3 |
| 2.8 | 2 | 60 | 34.2 | 2.8 | 3 |
| 2.8 | 2 | 59 | 35.2 | 2.8 | 3 |
| 2.8 | 2 | 58 | 36.2 | 2.8 | 3 |
| 2.8 | 2 | 57 | 37.2 | 2.8 | 3 |
| 2.8 | 2 | 56 | 38.2 | 2.8 | 3 |
| 2.8 | 2 | 55 | 39.2 | 2.8 | 3 |
| 2.8 | 2 | 54 | 40.2 | 2.8 | 3 |
| 2.8 | 2 | 53 | 41.2 | 2.8 | 3 |
| 2.8 | 2 | 52 | 42.2 | 2.8 | 3 |
| 2.8 | 2 | 51 | 43.2 | 2.8 | 3 |
| 2.8 | 2 | 50 | 44.2 | 2.8 | 3 |
| 2.8 | 2 | 49 | 45.2 | 2.8 | 3 |
| 2.8 | 2 | 48 | 46.2 | 2.8 | 3 |
| 2.8 | 2 | 47 | 47.2 | 2.8 | 3 |
| 2.8 | 2 | 46 | 48.2 | 2.8 | 3 |
| 2.8 | 2 | 45 | 49.2 | 2.8 | 3 |
| 2.8 | 2 | 44 | 50.2 | 2.8 | 3 |
| 2.8 | 2 | 43 | 51.2 | 2.8 | 3 |
| 2.8 | 2 | 42 | 52.2 | 2.8 | 3 |
| 2.8 | 2 | 41 | 53.2 | 2.8 | 3 |
| 2.8 | 2 | 40 | 54.2 | 2.8 | 3 |
| 2.8 | 2 | 39 | 55.2 | 2.8 | 3 |
| 2.8 | 2 | 38 | 56.2 | 2.8 | 3 |
| 2.8 | 2 | 37 | 57.2 | 2.8 | 3 |
| 2.8 | 2 | 36 | 58.2 | 2.8 | 3 |
| 2.8 | 2 | 35 | 59.2 | 2.8 | 3 |
| 2.8 | 2 | 34 | 60.2 | 2.8 | 3 |
| 2.8 | 2 | 33 | 61.2 | 2.8 | 3 |
| 2.8 | 2 | 32 | 62.2 | 2.8 | 3 |
| 2.8 | 2 | 31 | 63.2 | 2.8 | 3 |
| 2.8 | 2 | 30 | 64.2 | 2.8 | 3 |
| 3 | 2 | 60 | 34 | 3 | 3 |
| 3 | 2 | 59 | 35 | 3 | 3 |
| 3 | 2 | 58 | 36 | 3 | 3 |
| 3 | 2 | 57 | 37 | 3 | 3 |
| 3 | 2 | 56 | 38 | 3 | 3 |
| 3 | 2 | 55 | 39 | 3 | 3 |
| 3 | 2 | 54 | 40 | 3 | 3 |
| 3 | 2 | 53 | 41 | 3 | 3 |
| 3 | 2 | 52 | 42 | 3 | 3 |
| 3 | 2 | 51 | 43 | 3 | 3 |
| 3 | 2 | 50 | 44 | 3 | 3 |
| 3 | 2 | 49 | 45 | 3 | 3 |
| 3 | 2 | 48 | 46 | 3 | 3 |
| 3 | 2 | 47 | 47 | 3 | 3 |
| 3 | 2 | 46 | 48 | 3 | 3 |
| 3 | 2 | 45 | 49 | 3 | 3 |
| 3 | 2 | 44 | 50 | 3 | 3 |
| 3 | 2 | 43 | 51 | 3 | 3 |
| 3 | 2 | 42 | 52 | 3 | 3 |
| 3 | 2 | 41 | 53 | 3 | 3 |
| 3 | 2 | 40 | 54 | 3 | 3 |
| 3 | 2 | 39 | 55 | 3 | 3 |
| 3 | 2 | 38 | 56 | 3 | 3 |
| 3 | 2 | 37 | 57 | 3 | 3 |
| 3 | 2 | 36 | 58 | 3 | 3 |
| 3 | 2 | 35 | 59 | 3 | 3 |
| 3 | 2 | 34 | 60 | 3 | 3 |
| 3 | 2 | 33 | 61 | 3 | 3 |
| 3 | 2 | 32 | 62 | 3 | 3 |
| 3 | 2 | 31 | 63 | 3 | 3 |
| 3 | 2 | 30 | 64 | 3 | 3 |
| 1 | 2 | 60 | 32 | 1 | 7 |
| 1 | 2 | 59 | 33 | 1 | 7 |
| 1 | 2 | 58 | 34 | 1 | 7 |
| 1 | 2 | 57 | 35 | 1 | 7 |
| 1 | 2 | 56 | 36 | 1 | 7 |
| 1 | 2 | 55 | 37 | 1 | 7 |
| 1 | 2 | 54 | 38 | 1 | 7 |
| 1 | 2 | 53 | 39 | 1 | 7 |
| 1 | 2 | 52 | 40 | 1 | 7 |
| 1 | 2 | 51 | 41 | 1 | 7 |
| 1 | 2 | 50 | 42 | 1 | 7 |
| 1 | 2 | 49 | 43 | 1 | 7 |
| 1 | 2 | 48 | 44 | 1 | 7 |
| 1 | 2 | 47 | 45 | 1 | 7 |
| 1 | 2 | 46 | 46 | 1 | 7 |
| 1 | 2 | 45 | 47 | 1 | 7 |
| 1 | 6 | 44 | 48 | 1 | 7 |
| 1 | 6 | 43 | 49 | 1 | 7 |
| 1 | 6 | 42 | 50 | 1 | 7 |
| 1 | 6 | 41 | 51 | 1 | 7 |
| 1 | 6 | 40 | 52 | 1 | 7 |
| 1 | 6 | 39 | 53 | 1 | 7 |
| 1 | 6 | 38 | 54 | 1 | 7 |
| 1 | 6 | 37 | 55 | 1 | 7 |
| 1 | 6 | 36 | 56 | 1 | 7 |
| 1 | 6 | 35 | 57 | 1 | 7 |
| 1 | 6 | 34 | 58 | 1 | 7 |
| 1 | 6 | 33 | 59 | 1 | 7 |
| 1 | 6 | 32 | 60 | 1 | 7 |
| 1 | 6 | 31 | 61 | 1 | 7 |
| 1 | 6 | 30 | 62 | 1 | 7 |
| 1.2 | 6 | 60 | 31.8 | 1.2 | 7 |
| 1.2 | 6 | 59 | 32.8 | 1.2 | 7 |
| 1.2 | 6 | 58 | 33.8 | 1.2 | 7 |
| 1.2 | 6 | 57 | 34.8 | 1.2 | 7 |
| 1.2 | 6 | 56 | 35.8 | 1.2 | 7 |
| 1.2 | 6 | 55 | 36.8 | 1.2 | 7 |
| 1.2 | 6 | 54 | 37.8 | 1.2 | 7 |
| 1.2 | 6 | 53 | 38.8 | 1.2 | 7 |
| 1.2 | 6 | 52 | 39.8 | 1.2 | 7 |
| 1.2 | 6 | 51 | 40.8 | 1.2 | 7 |
| 1.2 | 6 | 50 | 41.8 | 1.2 | 7 |
| 1.2 | 6 | 49 | 42.8 | 1.2 | 7 |
| 1.2 | 6 | 48 | 43.8 | 1.2 | 7 |
| 1.2 | 6 | 47 | 44.8 | 1.2 | 7 |
| 1.2 | 6 | 46 | 45.8 | 1.2 | 7 |
| 1.2 | 6 | 45 | 46.8 | 1.2 | 7 |
| 1.2 | 6 | 44 | 47.8 | 1.2 | 7 |
| 1.2 | 6 | 43 | 48.8 | 1.2 | 7 |
| 1.2 | 6 | 42 | 49.8 | 1.2 | 7 |
| 1.2 | 6 | 41 | 50.8 | 1.2 | 7 |
| 1.2 | 6 | 40 | 51.8 | 1.2 | 7 |
| 1.2 | 6 | 39 | 52.8 | 1.2 | 7 |
| 1.2 | 6 | 38 | 53.8 | 1.2 | 7 |
| 1.2 | 6 | 37 | 54.8 | 1.2 | 7 |
| 1.2 | 6 | 36 | 55.8 | 1.2 | 7 |
| 1.2 | 6 | 35 | 56.8 | 1.2 | 7 |
| 1.2 | 6 | 34 | 57.8 | 1.2 | 7 |
| 1.2 | 6 | 33 | 58.8 | 1.2 | 7 |
| 1.2 | 6 | 32 | 59.8 | 1.2 | 7 |
| 1.2 | 6 | 31 | 60.8 | 1.2 | 7 |
| 1.2 | 6 | 30 | 61.8 | 1.2 | 7 |
| 1.4 | 6 | 60 | 31.6 | 1.4 | 7 |
| 1.4 | 6 | 59 | 32.6 | 1.4 | 7 |
| 1.4 | 6 | 58 | 33.6 | 1.4 | 7 |
| 1.4 | 6 | 57 | 34.6 | 1.4 | 7 |
| 1.4 | 6 | 56 | 35.6 | 1.4 | 7 |
| 1.4 | 6 | 55 | 36.6 | 1.4 | 7 |
| 1.4 | 6 | 54 | 37.6 | 1.4 | 7 |
| 1.4 | 6 | 53 | 38.6 | 1.4 | 7 |
| 1.4 | 6 | 52 | 39.6 | 1.4 | 7 |
| 1.4 | 6 | 51 | 40.6 | 1.4 | 7 |
| 1.4 | 6 | 50 | 41.6 | 1.4 | 7 |
| 1.4 | 6 | 49 | 42.6 | 1.4 | 7 |
| 1.4 | 6 | 48 | 43.6 | 1.4 | 7 |
| 1.4 | 6 | 47 | 44.6 | 1.4 | 7 |
| 1.4 | 6 | 46 | 45.6 | 1.4 | 7 |
| 1.4 | 6 | 45 | 46.6 | 1.4 | 7 |
| 1.4 | 6 | 44 | 47.6 | 1.4 | 7 |
| 1.4 | 6 | 43 | 48.6 | 1.4 | 7 |
| 1.4 | 6 | 42 | 49.6 | 1.4 | 7 |
| 1.4 | 6 | 41 | 50.6 | 1.4 | 7 |
| 1.4 | 6 | 40 | 51.6 | 1.4 | 7 |
| 1.4 | 6 | 39 | 52.6 | 1.4 | 7 |
| 1.4 | 6 | 38 | 53.6 | 1.4 | 7 |
| 1.4 | 6 | 37 | 54.6 | 1.4 | 7 |
| 1.4 | 6 | 36 | 55.6 | 1.4 | 7 |
| 1.4 | 6 | 35 | 56.6 | 1.4 | 7 |
| 1.4 | 6 | 34 | 57.6 | 1.4 | 7 |
| 1.4 | 6 | 33 | 58.6 | 1.4 | 7 |
| 1.4 | 6 | 32 | 59.6 | 1.4 | 7 |
| 1.4 | 6 | 31 | 60.6 | 1.4 | 7 |
| 1.4 | 6 | 30 | 61.6 | 1.4 | 7 |
| 1.6 | 6 | 60 | 31.4 | 1.6 | 7 |
| 1.6 | 6 | 59 | 32.4 | 1.6 | 7 |
| 1.6 | 6 | 58 | 33.4 | 1.6 | 7 |
| 1.6 | 6 | 57 | 34.4 | 1.6 | 7 |
| 1.6 | 6 | 56 | 35.4 | 1.6 | 7 |
| 1.6 | 6 | 55 | 36.4 | 1.6 | 7 |
| 1.6 | 6 | 54 | 37.4 | 1.6 | 7 |
| 1.6 | 6 | 53 | 38.4 | 1.6 | 7 |
| 1.6 | 6 | 52 | 39.4 | 1.6 | 7 |
| 1.6 | 6 | 51 | 40.4 | 1.6 | 7 |
| 1.6 | 6 | 50 | 41.4 | 1.6 | 7 |
| 1.6 | 6 | 49 | 42.4 | 1.6 | 7 |
| 1.6 | 6 | 48 | 43.4 | 1.6 | 7 |
| 1.6 | 6 | 47 | 44.4 | 1.6 | 7 |
| 1.6 | 6 | 46 | 45.4 | 1.6 | 7 |
| 1.6 | 6 | 45 | 46.4 | 1.6 | 7 |
| 1.6 | 6 | 44 | 47.4 | 1.6 | 7 |
| 1.6 | 6 | 43 | 48.4 | 1.6 | 7 |
| 1.6 | 6 | 42 | 49.4 | 1.6 | 7 |
| 1.6 | 6 | 41 | 50.4 | 1.6 | 7 |
| 1.6 | 6 | 40 | 51.4 | 1.6 | 7 |
| 1.6 | 6 | 39 | 52.4 | 1.6 | 7 |
| 1.6 | 6 | 38 | 53.4 | 1.6 | 7 |
| 1.6 | 6 | 37 | 54.4 | 1.6 | 7 |
| 1.6 | 6 | 36 | 55.4 | 1.6 | 7 |
| 1.6 | 6 | 35 | 56.4 | 1.6 | 7 |
| 1.6 | 6 | 34 | 57.4 | 1.6 | 7 |
| 1.6 | 6 | 33 | 58.4 | 1.6 | 7 |
| 1.6 | 6 | 32 | 59.4 | 1.6 | 7 |
| 1.6 | 6 | 31 | 60.4 | 1.6 | 7 |
| 1.6 | 6 | 30 | 61.4 | 1.6 | 7 |
| 1.8 | 6 | 60 | 31.2 | 1.8 | 7 |
| 1.8 | 6 | 59 | 32.2 | 1.8 | 7 |
| 1.8 | 6 | 58 | 33.2 | 1.8 | 7 |
| 1.8 | 6 | 57 | 34.2 | 1.8 | 7 |
| 1.8 | 6 | 56 | 35.2 | 1.8 | 7 |
| 1.8 | 6 | 55 | 36.2 | 1.8 | 7 |
| 1.8 | 6 | 54 | 37.2 | 1.8 | 7 |
| 1.8 | 6 | 53 | 38.2 | 1.8 | 7 |
| 1.8 | 6 | 52 | 39.2 | 1.8 | 7 |
| 1.8 | 6 | 51 | 40.2 | 1.8 | 7 |
| 1.8 | 6 | 50 | 41.2 | 1.8 | 7 |
| 1.8 | 6 | 49 | 42.2 | 1.8 | 7 |
| 1.8 | 6 | 48 | 43.2 | 1.8 | 7 |
| 1.8 | 6 | 47 | 44.2 | 1.8 | 7 |
| 1.8 | 6 | 46 | 45.2 | 1.8 | 7 |
| 1.8 | 6 | 45 | 46.2 | 1.8 | 7 |
| 1.8 | 6 | 44 | 47.2 | 1.8 | 7 |
| 1.8 | 6 | 43 | 48.2 | 1.8 | 7 |
| 1.8 | 6 | 42 | 49.2 | 1.8 | 7 |
| 1.8 | 6 | 41 | 50.2 | 1.8 | 7 |
| 1.8 | 6 | 40 | 51.2 | 1.8 | 7 |
| 1.8 | 6 | 39 | 52.2 | 1.8 | 7 |
| 1.8 | 6 | 38 | 53.2 | 1.8 | 7 |
| 1.8 | 6 | 37 | 54.2 | 1.8 | 7 |
| 1.8 | 6 | 36 | 55.2 | 1.8 | 7 |
| 1.8 | 6 | 35 | 56.2 | 1.8 | 7 |
| 1.8 | 6 | 34 | 57.2 | 1.8 | 7 |
| 1.8 | 6 | 33 | 58.2 | 1.8 | 7 |
| 1.8 | 6 | 32 | 59.2 | 1.8 | 7 |
| 1.8 | 6 | 31 | 60.2 | 1.8 | 7 |
| 1.8 | 6 | 30 | 61.2 | 1.8 | 7 |
| 2 | 6 | 60 | 31 | 2 | 7 |
| 2 | 6 | 59 | 32 | 2 | 7 |
| 2 | 6 | 58 | 33 | 2 | 7 |
| 2 | 6 | 57 | 34 | 2 | 7 |
| 2 | 6 | 56 | 35 | 2 | 7 |
| 2 | 6 | 55 | 36 | 2 | 7 |
| 2 | 6 | 54 | 37 | 2 | 7 |
| 2 | 6 | 53 | 38 | 2 | 7 |
| 2 | 6 | 52 | 39 | 2 | 7 |
| 2 | 6 | 51 | 40 | 2 | 7 |
| 2 | 6 | 50 | 41 | 2 | 7 |
| 2 | 6 | 49 | 42 | 2 | 7 |
| 2 | 6 | 48 | 43 | 2 | 7 |
| 2 | 6 | 47 | 44 | 2 | 7 |
| 2 | 6 | 46 | 45 | 2 | 7 |
| 2 | 6 | 45 | 46 | 2 | 7 |
| 2 | 6 | 44 | 47 | 2 | 7 |
| 2 | 6 | 43 | 48 | 2 | 7 |
| 2 | 6 | 42 | 49 | 2 | 7 |
| 2 | 6 | 41 | 50 | 2 | 7 |
| 2 | 6 | 40 | 51 | 2 | 7 |
| 2 | 6 | 39 | 52 | 2 | 7 |
| 2 | 6 | 38 | 53 | 2 | 7 |
| 2 | 6 | 37 | 54 | 2 | 7 |
| 2 | 6 | 36 | 55 | 2 | 7 |
| 2 | 6 | 35 | 56 | 2 | 7 |
| 2 | 6 | 34 | 57 | 2 | 7 |
| 2 | 6 | 33 | 58 | 2 | 7 |
| 2 | 6 | 32 | 59 | 2 | 7 |
| 2 | 6 | 31 | 60 | 2 | 7 |
| 2 | 6 | 30 | 61 | 2 | 7 |
| 2.2 | 6 | 60 | 30.8 | 2.2 | 7 |
| 2.2 | 6 | 59 | 31.8 | 2.2 | 7 |
| 2.2 | 6 | 58 | 32.8 | 2.2 | 7 |
| 2.2 | 6 | 57 | 33.8 | 2.2 | 7 |
| 2.2 | 6 | 56 | 34.8 | 2.2 | 7 |
| 2.2 | 6 | 55 | 35.8 | 2.2 | 7 |
| 2.2 | 6 | 54 | 36.8 | 2.2 | 7 |
| 2.2 | 6 | 53 | 37.8 | 2.2 | 7 |
| 2.2 | 6 | 52 | 38.8 | 2.2 | 7 |
| 2.2 | 6 | 51 | 39.8 | 2.2 | 7 |
| 2.2 | 6 | 50 | 40.8 | 2.2 | 7 |
| 2.2 | 6 | 49 | 41.8 | 2.2 | 7 |
| 2.2 | 6 | 48 | 42.8 | 2.2 | 7 |
| 2.2 | 6 | 47 | 43.8 | 2.2 | 7 |
| 2.2 | 6 | 46 | 44.8 | 2.2 | 7 |
| 2.2 | 6 | 45 | 45.8 | 2.2 | 7 |
| 2.2 | 6 | 44 | 46.8 | 2.2 | 7 |
| 2.2 | 6 | 43 | 47.8 | 2.2 | 7 |
| 2.2 | 6 | 42 | 48.8 | 2.2 | 7 |
| 2.2 | 6 | 41 | 49.8 | 2.2 | 7 |
| 2.2 | 6 | 40 | 50.8 | 2.2 | 7 |
| 2.2 | 6 | 39 | 51.8 | 2.2 | 7 |
| 2.2 | 6 | 38 | 52.8 | 2.2 | 7 |
| 2.2 | 6 | 37 | 53.8 | 2.2 | 7 |
| 2.2 | 6 | 36 | 54.8 | 2.2 | 7 |
| 2.2 | 6 | 35 | 55.8 | 2.2 | 7 |
| 2.2 | 6 | 34 | 56.8 | 2.2 | 7 |
| 2.2 | 6 | 33 | 57.8 | 2.2 | 7 |
| 2.2 | 6 | 32 | 58.8 | 2.2 | 7 |
| 2.2 | 6 | 31 | 59.8 | 2.2 | 7 |
| 2.2 | 6 | 30 | 60.8 | 2.2 | 7 |
| 2.4 | 6 | 60 | 30.6 | 2.4 | 7 |
| 2.4 | 6 | 59 | 31.6 | 2.4 | 7 |
| 2.4 | 6 | 58 | 32.6 | 2.4 | 7 |
| 2.4 | 6 | 57 | 33.6 | 2.4 | 7 |
| 2.4 | 6 | 56 | 34.6 | 2.4 | 7 |
| 2.4 | 6 | 55 | 35.6 | 2.4 | 7 |
| 2.4 | 6 | 54 | 36.6 | 2.4 | 7 |
| 2.4 | 6 | 53 | 37.6 | 2.4 | 7 |
| 2.4 | 6 | 52 | 38.6 | 2.4 | 7 |
| 2.4 | 6 | 51 | 39.6 | 2.4 | 7 |
| 2.4 | 6 | 50 | 40.6 | 2.4 | 7 |
| 2.4 | 6 | 49 | 41.6 | 2.4 | 7 |
| 2.4 | 6 | 48 | 42.6 | 2.4 | 7 |
| 2.4 | 6 | 47 | 43.6 | 2.4 | 7 |
| 2.4 | 6 | 46 | 44.6 | 2.4 | 7 |
| 2.4 | 6 | 45 | 45.6 | 2.4 | 7 |
| 2.4 | 6 | 44 | 46.6 | 2.4 | 7 |
| 2.4 | 6 | 43 | 47.6 | 2.4 | 7 |
| 2.4 | 6 | 42 | 48.6 | 2.4 | 7 |
| 2.4 | 6 | 41 | 49.6 | 2.4 | 7 |
| 2.4 | 6 | 40 | 50.6 | 2.4 | 7 |
| 2.4 | 6 | 39 | 51.6 | 2.4 | 7 |
| 2.4 | 6 | 38 | 52.6 | 2.4 | 7 |
| 2.4 | 6 | 37 | 53.6 | 2.4 | 7 |
| 2.4 | 6 | 36 | 54.6 | 2.4 | 7 |
| 2.4 | 6 | 35 | 55.6 | 2.4 | 7 |
| 2.4 | 6 | 34 | 56.6 | 2.4 | 7 |
| 2.4 | 6 | 33 | 57.6 | 2.4 | 7 |
| 2.4 | 6 | 32 | 58.6 | 2.4 | 7 |
| 2.4 | 6 | 31 | 59.6 | 2.4 | 7 |
| 2.4 | 6 | 30 | 60.6 | 2.4 | 7 |
| 2.6 | 6 | 60 | 30.4 | 2.6 | 7 |
| 2.6 | 6 | 59 | 31.4 | 2.6 | 7 |
| 2.6 | 6 | 58 | 32.4 | 2.6 | 7 |
| 2.6 | 6 | 57 | 33.4 | 2.6 | 7 |
| 2.6 | 6 | 56 | 34.4 | 2.6 | 7 |
| 2.6 | 6 | 55 | 35.4 | 2.6 | 7 |
| 2.6 | 6 | 54 | 36.4 | 2.6 | 7 |
| 2.6 | 6 | 53 | 37.4 | 2.6 | 7 |
| 2.6 | 6 | 52 | 38.4 | 2.6 | 7 |
| 2.6 | 6 | 51 | 39.4 | 2.6 | 7 |
| 2.6 | 6 | 50 | 40.4 | 2.6 | 7 |
| 2.6 | 6 | 49 | 41.4 | 2.6 | 7 |
| 2.6 | 6 | 48 | 42.4 | 2.6 | 7 |
| 2.6 | 6 | 47 | 43.4 | 2.6 | 7 |
| 2.6 | 6 | 46 | 44.4 | 2.6 | 7 |
| 2.6 | 6 | 45 | 45.4 | 2.6 | 7 |
| 2.6 | 6 | 44 | 46.4 | 2.6 | 7 |
| 2.6 | 6 | 43 | 47.4 | 2.6 | 7 |
| 2.6 | 6 | 42 | 48.4 | 2.6 | 7 |
| 2.6 | 6 | 41 | 49.4 | 2.6 | 7 |
| 2.6 | 6 | 40 | 50.4 | 2.6 | 7 |
| 2.6 | 6 | 39 | 51.4 | 2.6 | 7 |
| 2.6 | 6 | 38 | 52.4 | 2.6 | 7 |
| 2.6 | 6 | 37 | 53.4 | 2.6 | 7 |
| 2.6 | 6 | 36 | 54.4 | 2.6 | 7 |
| 2.6 | 6 | 35 | 55.4 | 2.6 | 7 |
| 2.6 | 6 | 34 | 56.4 | 2.6 | 7 |
| 2.6 | 6 | 33 | 57.4 | 2.6 | 7 |
| 2.6 | 6 | 32 | 58.4 | 2.6 | 7 |
| 2.6 | 6 | 31 | 59.4 | 2.6 | 7 |
| 2.6 | 6 | 30 | 60.4 | 2.6 | 7 |
| 2.8 | 6 | 60 | 30.2 | 2.8 | 7 |
| 2.8 | 6 | 59 | 31.2 | 2.8 | 7 |
| 2.8 | 6 | 58 | 32.2 | 2.8 | 7 |
| 2.8 | 6 | 57 | 33.2 | 2.8 | 7 |
| 2.8 | 6 | 56 | 34.2 | 2.8 | 7 |
| 2.8 | 6 | 55 | 35.2 | 2.8 | 7 |
| 2.8 | 6 | 54 | 36.2 | 2.8 | 7 |
| 2.8 | 6 | 53 | 37.2 | 2.8 | 7 |
| 2.8 | 6 | 52 | 38.2 | 2.8 | 7 |
| 2.8 | 6 | 51 | 39.2 | 2.8 | 7 |
| 2.8 | 6 | 50 | 40.2 | 2.8 | 7 |
| 2.8 | 6 | 49 | 41.2 | 2.8 | 7 |
| 2.8 | 6 | 48 | 42.2 | 2.8 | 7 |
| 2.8 | 6 | 47 | 43.2 | 2.8 | 7 |
| 2.8 | 6 | 46 | 44.2 | 2.8 | 7 |
| 2.8 | 6 | 45 | 45.2 | 2.8 | 7 |
| 2.8 | 6 | 44 | 46.2 | 2.8 | 7 |
| 2.8 | 6 | 43 | 47.2 | 2.8 | 7 |
| 2.8 | 6 | 42 | 48.2 | 2.8 | 7 |
| 2.8 | 6 | 41 | 49.2 | 2.8 | 7 |
| 2.8 | 6 | 40 | 50.2 | 2.8 | 7 |
| 2.8 | 6 | 39 | 51.2 | 2.8 | 7 |
| 2.8 | 6 | 38 | 52.2 | 2.8 | 7 |
| 2.8 | 6 | 37 | 53.2 | 2.8 | 7 |
| 2.8 | 6 | 36 | 54.2 | 2.8 | 7 |
| 2.8 | 6 | 35 | 55.2 | 2.8 | 7 |
| 2.8 | 6 | 34 | 56.2 | 2.8 | 7 |
| 2.8 | 6 | 33 | 57.2 | 2.8 | 7 |
| 2.8 | 6 | 32 | 58.2 | 2.8 | 7 |
| 2.8 | 6 | 31 | 59.2 | 2.8 | 7 |
| 2.8 | 6 | 30 | 60.2 | 2.8 | 7 |
| 3 | 6 | 60 | 30 | 3 | 7 |
| 3 | 6 | 59 | 31 | 3 | 7 |
| 3 | 6 | 58 | 32 | 3 | 7 |
| 3 | 6 | 57 | 33 | 3 | 7 |
| 3 | 6 | 56 | 34 | 3 | 7 |
| 3 | 6 | 55 | 35 | 3 | 7 |
| 3 | 6 | 54 | 36 | 3 | 7 |
| 3 | 6 | 53 | 37 | 3 | 7 |
| 3 | 6 | 52 | 38 | 3 | 7 |
| 3 | 6 | 51 | 39 | 3 | 7 |
| 3 | 6 | 50 | 40 | 3 | 7 |
| 3 | 6 | 49 | 41 | 3 | 7 |
| 3 | 6 | 48 | 42 | 3 | 7 |
| 3 | 6 | 47 | 43 | 3 | 7 |
| 3 | 6 | 46 | 44 | 3 | 7 |
| 3 | 6 | 45 | 45 | 3 | 7 |
| 3 | 6 | 44 | 46 | 3 | 7 |
| 3 | 6 | 43 | 47 | 3 | 7 |
| 3 | 6 | 42 | 48 | 3 | 7 |
| 3 | 6 | 41 | 49 | 3 | 7 |
| 3 | 6 | 40 | 50 | 3 | 7 |
| 3 | 6 | 39 | 51 | 3 | 7 |
| 3 | 6 | 38 | 52 | 3 | 7 |
| 3 | 6 | 37 | 53 | 3 | 7 |
| 3 | 6 | 36 | 54 | 3 | 7 |
| 3 | 6 | 35 | 55 | 3 | 7 |
| 3 | 6 | 34 | 56 | 3 | 7 |
| 3 | 6 | 33 | 57 | 3 | 7 |
| 3 | 6 | 32 | 58 | 3 | 7 |
| 3 | 6 | 31 | 59 | 3 | 7 |
| 3 | 6 | 30 | 60 | 3 | 7 |
| 1 | 10 | 60 | 28 | 1 | 11 |
| 1 | 10 | 59 | 29 | 1 | 11 |
| 1 | 10 | 58 | 30 | 1 | 11 |
| 1 | 10 | 57 | 31 | 1 | 11 |
| 1 | 10 | 56 | 32 | 1 | 11 |
| 1 | 10 | 55 | 33 | 1 | 11 |
| 1 | 10 | 54 | 34 | 1 | 11 |
| 1 | 10 | 53 | 35 | 1 | 11 |
| 1 | 10 | 52 | 36 | 1 | 11 |
| 1 | 10 | 51 | 37 | 1 | 11 |
| 1 | 10 | 50 | 38 | 1 | 11 |
| 1 | 10 | 49 | 39 | 1 | 11 |
| 1 | 10 | 48 | 40 | 1 | 11 |
| 1 | 10 | 47 | 41 | 1 | 11 |
| 1 | 10 | 46 | 42 | 1 | 11 |
| 1 | 10 | 45 | 43 | 1 | 11 |
| 1 | 10 | 44 | 44 | 1 | 11 |
| 1 | 10 | 43 | 45 | 1 | 11 |
| 1 | 10 | 42 | 46 | 1 | 11 |
| 1 | 10 | 41 | 47 | 1 | 11 |
| 1 | 10 | 40 | 48 | 1 | 11 |
| 1 | 10 | 39 | 49 | 1 | 11 |
| 1 | 10 | 38 | 50 | 1 | 11 |
| 1 | 10 | 37 | 51 | 1 | 11 |
| 1 | 10 | 36 | 52 | 1 | 11 |
| 1 | 10 | 35 | 53 | 1 | 11 |
| 1 | 10 | 34 | 54 | 1 | 11 |
| 1 | 10 | 33 | 55 | 1 | 11 |
| 1 | 10 | 32 | 56 | 1 | 11 |
| 1 | 10 | 31 | 57 | 1 | 11 |
| 1 | 10 | 30 | 58 | 1 | 11 |
| 1.2 | 10 | 60 | 27.8 | 1.2 | 11 |
| 1.2 | 10 | 59 | 28.8 | 1.2 | 11 |
| 1.2 | 10 | 58 | 29.8 | 1.2 | 11 |
| 1.2 | 10 | 57 | 30.8 | 1.2 | 11 |
| 1.2 | 10 | 56 | 31.8 | 1.2 | 11 |
| 1.2 | 10 | 55 | 32.8 | 1.2 | 11 |
| 1.2 | 10 | 54 | 33.8 | 1.2 | 11 |
| 1.2 | 10 | 53 | 34.8 | 1.2 | 11 |
| 1.2 | 10 | 52 | 35.8 | 1.2 | 11 |
| 1.2 | 10 | 51 | 36.8 | 1.2 | 11 |
| 1.2 | 10 | 50 | 37.8 | 1.2 | 11 |
| 1.2 | 10 | 49 | 38.8 | 1.2 | 11 |
| 1.2 | 10 | 48 | 39.8 | 1.2 | 11 |
| 1.2 | 10 | 47 | 40.8 | 1.2 | 11 |
| 1.2 | 10 | 46 | 41.8 | 1.2 | 11 |
| 1.2 | 10 | 45 | 42.8 | 1.2 | 11 |
| 1.2 | 10 | 44 | 43.8 | 1.2 | 11 |
| 1.2 | 10 | 43 | 44.8 | 1.2 | 11 |
| 1.2 | 10 | 42 | 45.8 | 1.2 | 11 |
| 1.2 | 10 | 41 | 46.8 | 1.2 | 11 |
| 1.2 | 10 | 40 | 47.8 | 1.2 | 11 |
| 1.2 | 10 | 39 | 48.8 | 1.2 | 11 |
| 1.2 | 10 | 38 | 49.8 | 1.2 | 11 |
| 1.2 | 10 | 37 | 50.8 | 1.2 | 11 |
| 1.2 | 10 | 36 | 51.8 | 1.2 | 11 |
| 1.2 | 10 | 35 | 52.8 | 1.2 | 11 |
| 1.2 | 10 | 34 | 53.8 | 1.2 | 11 |
| 1.2 | 10 | 33 | 54.8 | 1.2 | 11 |
| 1.2 | 10 | 32 | 55.8 | 1.2 | 11 |
| 1.2 | 10 | 31 | 56.8 | 1.2 | 11 |
| 1.2 | 10 | 30 | 57.8 | 1.2 | 11 |
| 1.4 | 10 | 60 | 27.6 | 1.4 | 11 |
| 1.4 | 10 | 59 | 28.6 | 1.4 | 11 |
| 1.4 | 10 | 58 | 29.6 | 1.4 | 11 |
| 1.4 | 10 | 57 | 30.6 | 1.4 | 11 |
| 1.4 | 10 | 56 | 31.6 | 1.4 | 11 |
| 1.4 | 10 | 55 | 32.6 | 1.4 | 11 |
| 1.4 | 10 | 54 | 33.6 | 1.4 | 11 |
| 1.4 | 10 | 53 | 34.6 | 1.4 | 11 |
| 1.4 | 10 | 52 | 35.6 | 1.4 | 11 |
| 1.4 | 10 | 51 | 36.6 | 1.4 | 11 |
| 1.4 | 10 | 50 | 37.6 | 1.4 | 11 |
| 1.4 | 10 | 49 | 38.6 | 1.4 | 11 |
| 1.4 | 10 | 48 | 39.6 | 1.4 | 11 |
| 1.4 | 10 | 47 | 40.6 | 1.4 | 11 |
| 1.4 | 10 | 46 | 41.6 | 1.4 | 11 |
| 1.4 | 10 | 45 | 42.6 | 1.4 | 11 |
| 1.4 | 10 | 44 | 43.6 | 1.4 | 11 |
| 1.4 | 10 | 43 | 44.6 | 1.4 | 11 |
| 1.4 | 10 | 42 | 45.6 | 1.4 | 11 |
| 1.4 | 10 | 41 | 46.6 | 1.4 | 11 |
| 1.4 | 10 | 40 | 47.6 | 1.4 | 11 |
| 1.4 | 10 | 39 | 48.6 | 1.4 | 11 |
| 1.4 | 10 | 38 | 49.6 | 1.4 | 11 |
| 1.4 | 10 | 37 | 50.6 | 1.4 | 11 |
| 1.4 | 10 | 36 | 51.6 | 1.4 | 11 |
| 1.4 | 10 | 35 | 52.6 | 1.4 | 11 |
| 1.4 | 10 | 34 | 53.6 | 1.4 | 11 |
| 1.4 | 10 | 33 | 54.6 | 1.4 | 11 |
| 1.4 | 10 | 32 | 55.6 | 1.4 | 11 |
| 1.4 | 10 | 31 | 56.6 | 1.4 | 11 |
| 1.4 | 10 | 30 | 57.6 | 1.4 | 11 |
| 1.6 | 10 | 60 | 27.4 | 1.6 | 11 |
| 1.6 | 10 | 59 | 28.4 | 1.6 | 11 |
| 1.6 | 10 | 58 | 29.4 | 1.6 | 11 |
| 1.6 | 10 | 57 | 30.4 | 1.6 | 11 |
| 1.6 | 10 | 56 | 31.4 | 1.6 | 11 |
| 1.6 | 10 | 55 | 32.4 | 1.6 | 11 |
| 1.6 | 10 | 54 | 33.4 | 1.6 | 11 |
| 1.6 | 10 | 53 | 34.4 | 1.6 | 11 |
| 1.6 | 10 | 52 | 35.4 | 1.6 | 11 |
| 1.6 | 10 | 51 | 36.4 | 1.6 | 11 |
| 1.6 | 10 | 50 | 37.4 | 1.6 | 11 |
| 1.6 | 10 | 49 | 38.4 | 1.6 | 11 |
| 1.6 | 10 | 48 | 39.4 | 1.6 | 11 |
| 1.6 | 10 | 47 | 40.4 | 1.6 | 11 |
| 1.6 | 10 | 46 | 41.4 | 1.6 | 11 |
| 1.6 | 10 | 45 | 42.4 | 1.6 | 11 |
| 1.6 | 10 | 44 | 43.4 | 1.6 | 11 |
| 1.6 | 10 | 43 | 44.4 | 1.6 | 11 |
| 1.6 | 10 | 42 | 45.4 | 1.6 | 11 |
| 1.6 | 10 | 41 | 46.4 | 1.6 | 11 |
| 1.6 | 10 | 40 | 47.4 | 1.6 | 11 |
| 1.6 | 10 | 39 | 48.4 | 1.6 | 11 |
| 1.6 | 10 | 38 | 49.4 | 1.6 | 11 |
| 1.6 | 10 | 37 | 50.4 | 1.6 | 11 |
| 1.6 | 10 | 36 | 51.4 | 1.6 | 11 |
| 1.6 | 10 | 35 | 52.4 | 1.6 | 11 |
| 1.6 | 10 | 34 | 53.4 | 1.6 | 11 |
| 1.6 | 10 | 33 | 54.4 | 1.6 | 11 |
| 1.6 | 10 | 32 | 55.4 | 1.6 | 11 |
| 1.6 | 10 | 31 | 56.4 | 1.6 | 11 |
| 1.6 | 10 | 30 | 57.4 | 1.6 | 11 |
| 1.8 | 10 | 60 | 27.2 | 1.8 | 11 |
| 1.8 | 10 | 59 | 28.2 | 1.8 | 11 |
| 1.8 | 10 | 58 | 29.2 | 1.8 | 11 |
| 1.8 | 10 | 57 | 30.2 | 1.8 | 11 |
| 1.8 | 10 | 56 | 31.2 | 1.8 | 11 |
| 1.8 | 10 | 55 | 32.2 | 1.8 | 11 |
| 1.8 | 10 | 54 | 33.2 | 1.8 | 11 |
| 1.8 | 10 | 53 | 34.2 | 1.8 | 11 |
| 1.8 | 10 | 52 | 35.2 | 1.8 | 11 |
| 1.8 | 10 | 51 | 36.2 | 1.8 | 11 |
| 1.8 | 10 | 50 | 37.2 | 1.8 | 11 |
| 1.8 | 10 | 49 | 38.2 | 1.8 | 11 |
| 1.8 | 10 | 48 | 39.2 | 1.8 | 11 |
| 1.8 | 10 | 47 | 40.2 | 1.8 | 11 |
| 1.8 | 10 | 46 | 41.2 | 1.8 | 11 |
| 1.8 | 10 | 45 | 42.2 | 1.8 | 11 |
| 1.8 | 10 | 44 | 43.2 | 1.8 | 11 |
| 1.8 | 10 | 43 | 44.2 | 1.8 | 11 |
| 1.8 | 10 | 42 | 45.2 | 1.8 | 11 |
| 1.8 | 10 | 41 | 46.2 | 1.8 | 11 |
| 1.8 | 10 | 40 | 47.2 | 1.8 | 11 |
| 1.8 | 10 | 39 | 48.2 | 1.8 | 11 |
| 1.8 | 10 | 38 | 49.2 | 1.8 | 11 |
| 1.8 | 10 | 37 | 50.2 | 1.8 | 11 |
| 1.8 | 10 | 36 | 51.2 | 1.8 | 11 |
| 1.8 | 10 | 35 | 52.2 | 1.8 | 11 |
| 1.8 | 10 | 34 | 53.2 | 1.8 | 11 |
| 1.8 | 10 | 33 | 54.2 | 1.8 | 11 |
| 1.8 | 10 | 32 | 55.2 | 1.8 | 11 |
| 1.8 | 10 | 31 | 56.2 | 1.8 | 11 |
| 1.8 | 10 | 30 | 57.2 | 1.8 | 11 |
| 2 | 10 | 60 | 27 | 2 | 11 |
| 2 | 10 | 59 | 28 | 2 | 11 |
| 2 | 10 | 58 | 29 | 2 | 11 |
| 2 | 10 | 57 | 30 | 2 | 11 |
| 2 | 10 | 56 | 31 | 2 | 11 |
| 2 | 10 | 55 | 32 | 2 | 11 |
| 2 | 10 | 54 | 33 | 2 | 11 |
| 2 | 10 | 53 | 34 | 2 | 11 |
| 2 | 10 | 52 | 35 | 2 | 11 |
| 2 | 10 | 51 | 36 | 2 | 11 |
| 2 | 10 | 50 | 37 | 2 | 11 |
| 2 | 10 | 49 | 38 | 2 | 11 |
| 2 | 10 | 48 | 39 | 2 | 11 |
| 2 | 10 | 47 | 40 | 2 | 11 |
| 2 | 10 | 46 | 41 | 2 | 11 |
| 2 | 10 | 45 | 42 | 2 | 11 |
| 2 | 10 | 44 | 43 | 2 | 11 |
| 2 | 10 | 43 | 44 | 2 | 11 |
| 2 | 10 | 42 | 45 | 2 | 11 |
| 2 | 10 | 41 | 46 | 2 | 11 |
| 2 | 10 | 40 | 47 | 2 | 11 |
| 2 | 10 | 39 | 48 | 2 | 11 |
| 2 | 10 | 38 | 49 | 2 | 11 |
| 2 | 10 | 37 | 50 | 2 | 11 |
| 2 | 10 | 36 | 51 | 2 | 11 |
| 2 | 10 | 35 | 52 | 2 | 11 |
| 2 | 10 | 34 | 53 | 2 | 11 |
| 2 | 10 | 33 | 54 | 2 | 11 |
| 2 | 10 | 32 | 55 | 2 | 11 |
| 2 | 10 | 31 | 56 | 2 | 11 |
| 2 | 10 | 30 | 57 | 2 | 11 |
| 2.2 | 10 | 60 | 26.8 | 2.2 | 11 |
| 2.2 | 10 | 59 | 27.8 | 2.2 | 11 |
| 2.2 | 10 | 58 | 28.8 | 2.2 | 11 |
| 2.2 | 10 | 57 | 29.8 | 2.2 | 11 |
| 2.2 | 10 | 56 | 30.8 | 2.2 | 11 |
| 2.2 | 10 | 55 | 31.8 | 2.2 | 11 |
| 2.2 | 10 | 54 | 32.8 | 2.2 | 11 |
| 2.2 | 10 | 53 | 33.8 | 2.2 | 11 |
| 2.2 | 10 | 52 | 34.8 | 2.2 | 11 |
| 2.2 | 10 | 51 | 35.8 | 2.2 | 11 |
| 2.2 | 10 | 50 | 36.8 | 2.2 | 11 |
| 2.2 | 10 | 49 | 37.8 | 2.2 | 11 |
| 2.2 | 10 | 48 | 38.8 | 2.2 | 11 |
| 2.2 | 10 | 47 | 39.8 | 2.2 | 11 |
| 2.2 | 10 | 46 | 40.8 | 2.2 | 11 |
| 2.2 | 10 | 45 | 41.8 | 2.2 | 11 |
| 2.2 | 10 | 44 | 42.8 | 2.2 | 11 |
| 2.2 | 10 | 43 | 43.8 | 2.2 | 11 |
| 2.2 | 10 | 42 | 44.8 | 2.2 | 11 |
| 2.2 | 10 | 41 | 45.8 | 2.2 | 11 |
| 2.2 | 10 | 40 | 46.8 | 2.2 | 11 |
| 2.2 | 10 | 39 | 47.8 | 2.2 | 11 |
| 2.2 | 10 | 38 | 48.8 | 2.2 | 11 |
| 2.2 | 10 | 37 | 49.8 | 2.2 | 11 |
| 2.2 | 10 | 36 | 50.8 | 2.2 | 11 |
| 2.2 | 10 | 35 | 51.8 | 2.2 | 11 |
| 2.2 | 10 | 34 | 52.8 | 2.2 | 11 |
| 2.2 | 10 | 33 | 53.8 | 2.2 | 11 |
| 2.2 | 10 | 32 | 54.8 | 2.2 | 11 |
| 2.2 | 10 | 31 | 55.8 | 2.2 | 11 |
| 2.2 | 10 | 30 | 56.8 | 2.2 | 11 |
| 2.4 | 10 | 60 | 26.6 | 2.4 | 11 |
| 2.4 | 10 | 59 | 27.6 | 2.4 | 11 |
| 2.4 | 10 | 58 | 28.6 | 2.4 | 11 |
| 2.4 | 10 | 57 | 29.6 | 2.4 | 11 |
| 2.4 | 10 | 56 | 30.6 | 2.4 | 11 |
| 2.4 | 10 | 55 | 31.6 | 2.4 | 11 |
| 2.4 | 10 | 54 | 32.6 | 2.4 | 11 |
| 2.4 | 10 | 53 | 33.6 | 2.4 | 11 |
| 2.4 | 10 | 52 | 34.6 | 2.4 | 11 |
| 2.4 | 10 | 51 | 35.6 | 2.4 | 11 |
| 2.4 | 10 | 50 | 36.6 | 2.4 | 11 |
| 2.4 | 10 | 49 | 37.6 | 2.4 | 11 |
| 2.4 | 10 | 48 | 38.6 | 2.4 | 11 |
| 2.4 | 10 | 47 | 39.6 | 2.4 | 11 |
| 2.4 | 10 | 46 | 40.6 | 2.4 | 11 |
| 2.4 | 10 | 45 | 41.6 | 2.4 | 11 |
| 2.4 | 10 | 44 | 42.6 | 2.4 | 11 |
| 2.4 | 10 | 43 | 43.6 | 2.4 | 11 |
| 2.4 | 10 | 42 | 44.6 | 2.4 | 11 |
| 2.4 | 10 | 41 | 45.6 | 2.4 | 11 |
| 2.4 | 10 | 40 | 46.6 | 2.4 | 11 |
| 2.4 | 10 | 39 | 47.6 | 2.4 | 11 |
| 2.4 | 10 | 38 | 48.6 | 2.4 | 11 |
| 2.4 | 10 | 37 | 49.6 | 2.4 | 11 |
| 2.4 | 10 | 36 | 50.6 | 2.4 | 11 |
| 2.4 | 10 | 35 | 51.6 | 2.4 | 11 |
| 2.4 | 10 | 34 | 52.6 | 2.4 | 11 |
| 2.4 | 10 | 33 | 53.6 | 2.4 | 11 |
| 2.4 | 10 | 32 | 54.6 | 2.4 | 11 |
| 2.4 | 10 | 31 | 55.6 | 2.4 | 11 |
| 2.4 | 10 | 30 | 56.6 | 2.4 | 11 |
| 2.6 | 10 | 60 | 26.4 | 2.6 | 11 |
| 2.6 | 10 | 59 | 27.4 | 2.6 | 11 |
| 2.6 | 10 | 58 | 28.4 | 2.6 | 11 |
| 2.6 | 10 | 57 | 29.4 | 2.6 | 11 |
| 2.6 | 10 | 56 | 30.4 | 2.6 | 11 |
| 2.6 | 10 | 55 | 31.4 | 2.6 | 11 |
| 2.6 | 10 | 54 | 32.4 | 2.6 | 11 |
| 2.6 | 10 | 53 | 33.4 | 2.6 | 11 |
| 2.6 | 10 | 52 | 34.4 | 2.6 | 11 |
| 2.6 | 10 | 51 | 35.4 | 2.6 | 11 |
| 2.6 | 10 | 50 | 36.4 | 2.6 | 11 |
| 2.6 | 10 | 49 | 37.4 | 2.6 | 11 |
| 2.6 | 10 | 48 | 38.4 | 2.6 | 11 |
| 2.6 | 10 | 47 | 39.4 | 2.6 | 11 |
| 2.6 | 10 | 46 | 40.4 | 2.6 | 11 |
| 2.6 | 10 | 45 | 41.4 | 2.6 | 11 |
| 2.6 | 10 | 44 | 42.4 | 2.6 | 11 |
| 2.6 | 10 | 43 | 43.4 | 2.6 | 11 |
| 2.6 | 10 | 42 | 44.4 | 2.6 | 11 |
| 2.6 | 10 | 41 | 45.4 | 2.6 | 11 |
| 2.6 | 10 | 40 | 46.4 | 2.6 | 11 |
| 2.6 | 10 | 39 | 47.4 | 2.6 | 11 |
| 2.6 | 10 | 38 | 48.4 | 2.6 | 11 |
| 2.6 | 10 | 37 | 49.4 | 2.6 | 11 |
| 2.6 | 10 | 36 | 50.4 | 2.6 | 11 |
| 2.6 | 10 | 35 | 51.4 | 2.6 | 11 |
| 2.6 | 10 | 34 | 52.4 | 2.6 | 11 |
| 2.6 | 10 | 33 | 53.4 | 2.6 | 11 |
| 2.6 | 10 | 32 | 54.4 | 2.6 | 11 |
| 2.6 | 10 | 31 | 55.4 | 2.6 | 11 |
| 2.6 | 10 | 30 | 56.4 | 2.6 | 11 |
| 2.8 | 10 | 60 | 26.2 | 2.8 | 11 |
| 2.8 | 10 | 59 | 27.2 | 2.8 | 11 |
| 2.8 | 10 | 58 | 28.2 | 2.8 | 11 |
| 2.8 | 10 | 57 | 29.2 | 2.8 | 11 |
| 2.8 | 10 | 56 | 30.2 | 2.8 | 11 |
| 2.8 | 10 | 55 | 31.2 | 2.8 | 11 |
| 2.8 | 10 | 54 | 32.2 | 2.8 | 11 |
| 2.8 | 10 | 53 | 33.2 | 2.8 | 11 |
| 2.8 | 10 | 52 | 34.2 | 2.8 | 11 |
| 2.8 | 10 | 51 | 35.2 | 2.8 | 11 |
| 2.8 | 10 | 50 | 36.2 | 2.8 | 11 |
| 2.8 | 10 | 49 | 37.2 | 2.8 | 11 |
| 2.8 | 10 | 48 | 38.2 | 2.8 | 11 |
| 2.8 | 10 | 47 | 39.2 | 2.8 | 11 |
| 2.8 | 10 | 46 | 40.2 | 2.8 | 11 |
| 2.8 | 10 | 45 | 41.2 | 2.8 | 11 |
| 2.8 | 10 | 44 | 42.2 | 2.8 | 11 |
| 2.8 | 10 | 43 | 43.2 | 2.8 | 11 |
| 2.8 | 10 | 42 | 44.2 | 2.8 | 11 |
| 2.8 | 10 | 41 | 45.2 | 2.8 | 11 |
| 2.8 | 10 | 40 | 46.2 | 2.8 | 11 |
| 2.8 | 10 | 39 | 47.2 | 2.8 | 11 |
| 2.8 | 10 | 38 | 48.2 | 2.8 | 11 |
| 2.8 | 10 | 37 | 49.2 | 2.8 | 11 |
| 2.8 | 10 | 36 | 50.2 | 2.8 | 11 |
| 2.8 | 10 | 35 | 51.2 | 2.8 | 11 |
| 2.8 | 10 | 34 | 52.2 | 2.8 | 11 |
| 2.8 | 10 | 33 | 53.2 | 2.8 | 11 |
| 2.8 | 10 | 32 | 54.2 | 2.8 | 11 |
| 2.8 | 10 | 31 | 55.2 | 2.8 | 11 |
| 2.8 | 10 | 30 | 56.2 | 2.8 | 11 |
| 3 | 10 | 60 | 26 | 3 | 11 |
| 3 | 10 | 59 | 27 | 3 | 11 |
| 3 | 10 | 58 | 28 | 3 | 11 |
| 3 | 10 | 57 | 29 | 3 | 11 |
| 3 | 10 | 56 | 30 | 3 | 11 |
| 3 | 10 | 55 | 31 | 3 | 11 |
| 3 | 10 | 54 | 32 | 3 | 11 |
| 3 | 10 | 53 | 33 | 3 | 11 |
| 3 | 10 | 52 | 34 | 3 | 11 |
| 3 | 10 | 51 | 35 | 3 | 11 |
| 3 | 10 | 50 | 36 | 3 | 11 |
| 3 | 10 | 49 | 37 | 3 | 11 |
| 3 | 10 | 48 | 38 | 3 | 11 |
| 3 | 10 | 47 | 39 | 3 | 11 |
| 3 | 10 | 46 | 40 | 3 | 11 |
| 3 | 10 | 45 | 41 | 3 | 11 |
| 3 | 10 | 44 | 42 | 3 | 11 |
| 3 | 10 | 43 | 43 | 3 | 11 |
| 3 | 10 | 42 | 44 | 3 | 11 |
| 3 | 10 | 41 | 45 | 3 | 11 |
| 3 | 10 | 40 | 46 | 3 | 11 |
| 3 | 10 | 39 | 47 | 3 | 11 |
| 3 | 10 | 38 | 48 | 3 | 11 |
| 3 | 10 | 37 | 49 | 3 | 11 |
| 3 | 10 | 36 | 50 | 3 | 11 |
| 3 | 10 | 35 | 51 | 3 | 11 |
| 3 | 10 | 34 | 52 | 3 | 11 |
| 3 | 10 | 33 | 53 | 3 | 11 |
| 3 | 10 | 32 | 54 | 3 | 11 |
| 3 | 10 | 31 | 55 | 3 | 11 |
| 3 | 10 | 30 | 56 | 3 | 11 |
| 1 | 14 | 60 | 24 | 1 | 15 |
| 1 | 14 | 59 | 25 | 1 | 15 |
| 1 | 14 | 58 | 26 | 1 | 15 |
| 1 | 14 | 57 | 27 | 1 | 15 |
| 1 | 14 | 56 | 28 | 1 | 15 |
| 1 | 14 | 55 | 29 | 1 | 15 |
| 1 | 14 | 54 | 30 | 1 | 15 |
| 1 | 14 | 53 | 31 | 1 | 15 |
| 1 | 14 | 52 | 32 | 1 | 15 |
| 1 | 14 | 51 | 33 | 1 | 15 |
| 1 | 14 | 50 | 34 | 1 | 15 |
| 1 | 14 | 49 | 35 | 1 | 15 |
| 1 | 14 | 48 | 36 | 1 | 15 |
| 1 | 14 | 47 | 37 | 1 | 15 |
| 1 | 14 | 46 | 38 | 1 | 15 |
| 1 | 14 | 45 | 39 | 1 | 15 |
| 1 | 14 | 44 | 40 | 1 | 15 |
| 1 | 14 | 43 | 41 | 1 | 15 |
| 1 | 14 | 42 | 42 | 1 | 15 |
| 1 | 14 | 41 | 43 | 1 | 15 |
| 1 | 14 | 40 | 44 | 1 | 15 |
| 1 | 14 | 39 | 45 | 1 | 15 |
| 1 | 14 | 38 | 46 | 1 | 15 |
| 1 | 14 | 37 | 47 | 1 | 15 |
| 1 | 14 | 36 | 48 | 1 | 15 |
| 1 | 14 | 35 | 49 | 1 | 15 |
| 1 | 14 | 34 | 50 | 1 | 15 |
| 1 | 14 | 33 | 51 | 1 | 15 |
| 1 | 14 | 32 | 52 | 1 | 15 |
| 1 | 14 | 31 | 53 | 1 | 15 |
| 1 | 14 | 30 | 54 | 1 | 15 |
| 1.2 | 14 | 60 | 23.8 | 1.2 | 15 |
| 1.2 | 14 | 59 | 24.8 | 1.2 | 15 |
| 1.2 | 14 | 58 | 25.8 | 1.2 | 15 |
| 1.2 | 14 | 57 | 26.8 | 1.2 | 15 |
| 1.2 | 14 | 56 | 27.8 | 1.2 | 15 |
| 1.2 | 14 | 55 | 28.8 | 1.2 | 15 |
| 1.2 | 14 | 54 | 29.8 | 1.2 | 15 |
| 1.2 | 14 | 53 | 30.8 | 1.2 | 15 |
| 1.2 | 14 | 52 | 31.8 | 1.2 | 15 |
| 1.2 | 14 | 51 | 32.8 | 1.2 | 15 |
| 1.2 | 14 | 50 | 33.8 | 1.2 | 15 |
| 1.2 | 14 | 49 | 34.8 | 1.2 | 15 |
| 1.2 | 14 | 48 | 35.8 | 1.2 | 15 |
| 1.2 | 14 | 47 | 36.8 | 1.2 | 15 |
| 1.2 | 14 | 46 | 37.8 | 1.2 | 15 |
| 1.2 | 14 | 45 | 38.8 | 1.2 | 15 |
| 1.2 | 14 | 44 | 39.8 | 1.2 | 15 |
| 1.2 | 14 | 43 | 40.8 | 1.2 | 15 |
| 1.2 | 14 | 42 | 41.8 | 1.2 | 15 |
| 1.2 | 14 | 41 | 42.8 | 1.2 | 15 |
| 1.2 | 14 | 40 | 43.8 | 1.2 | 15 |
| 1.2 | 14 | 39 | 44.8 | 1.2 | 15 |
| 1.2 | 14 | 38 | 45.8 | 1.2 | 15 |
| 1.2 | 14 | 37 | 46.8 | 1.2 | 15 |
| 1.2 | 14 | 36 | 47.8 | 1.2 | 15 |
| 1.2 | 14 | 35 | 48.8 | 1.2 | 15 |
| 1.2 | 14 | 34 | 49.8 | 1.2 | 15 |
| 1.2 | 14 | 33 | 50.8 | 1.2 | 15 |
| 1.2 | 14 | 32 | 51.8 | 1.2 | 15 |
| 1.2 | 14 | 31 | 52.8 | 1.2 | 15 |
| 1.2 | 14 | 30 | 53.8 | 1.2 | 15 |
| 1.4 | 14 | 60 | 23.6 | 1.4 | 15 |
| 1.4 | 14 | 59 | 24.6 | 1.4 | 15 |
| 1.4 | 14 | 58 | 25.6 | 1.4 | 15 |
| 1.4 | 14 | 57 | 26.6 | 1.4 | 15 |
| 1.4 | 14 | 56 | 27.6 | 1.4 | 15 |
| 1.4 | 14 | 55 | 28.6 | 1.4 | 15 |
| 1.4 | 14 | 54 | 29.6 | 1.4 | 15 |
| 1.4 | 14 | 53 | 30.6 | 1.4 | 15 |
| 1.4 | 14 | 52 | 31.6 | 1.4 | 15 |
| 1.4 | 14 | 51 | 32.6 | 1.4 | 15 |
| 1.4 | 14 | 50 | 33.6 | 1.4 | 15 |
| 1.4 | 14 | 49 | 34.6 | 1.4 | 15 |
| 1.4 | 14 | 48 | 35.6 | 1.4 | 15 |
| 1.4 | 14 | 47 | 36.6 | 1.4 | 15 |
| 1.4 | 14 | 46 | 37.6 | 1.4 | 15 |
| 1.4 | 14 | 45 | 38.6 | 1.4 | 15 |
| 1.4 | 14 | 44 | 39.6 | 1.4 | 15 |
| 1.4 | 14 | 43 | 40.6 | 1.4 | 15 |
| 1.4 | 14 | 42 | 41.6 | 1.4 | 15 |
| 1.4 | 14 | 41 | 42.6 | 1.4 | 15 |
| 1.4 | 14 | 40 | 43.6 | 1.4 | 15 |
| 1.4 | 14 | 39 | 44.6 | 1.4 | 15 |
| 1.4 | 14 | 38 | 45.6 | 1.4 | 15 |
| 1.4 | 14 | 37 | 46.6 | 1.4 | 15 |
| 1.4 | 14 | 36 | 47.6 | 1.4 | 15 |
| 1.4 | 14 | 35 | 48.6 | 1.4 | 15 |
| 1.4 | 14 | 34 | 49.6 | 1.4 | 15 |
| 1.4 | 14 | 33 | 50.6 | 1.4 | 15 |
| 1.4 | 14 | 32 | 51.6 | 1.4 | 15 |
| 1.4 | 14 | 31 | 52.6 | 1.4 | 15 |
| 1.4 | 14 | 30 | 53.6 | 1.4 | 15 |
| 1.6 | 14 | 60 | 23.4 | 1.6 | 15 |
| 1.6 | 14 | 59 | 24.4 | 1.6 | 15 |
| 1.6 | 14 | 58 | 25.4 | 1.6 | 15 |
| 1.6 | 14 | 57 | 26.4 | 1.6 | 15 |
| 1.6 | 14 | 56 | 27.4 | 1.6 | 15 |
| 1.6 | 14 | 55 | 28.4 | 1.6 | 15 |
| 1.6 | 14 | 54 | 29.4 | 1.6 | 15 |
| 1.6 | 14 | 53 | 30.4 | 1.6 | 15 |
| 1.6 | 14 | 52 | 31.4 | 1.6 | 15 |
| 1.6 | 14 | 51 | 32.4 | 1.6 | 15 |
| 1.6 | 14 | 50 | 33.4 | 1.6 | 15 |
| 1.6 | 14 | 49 | 34.4 | 1.6 | 15 |
| 1.6 | 14 | 48 | 35.4 | 1.6 | 15 |
| 1.6 | 14 | 47 | 36.4 | 1.6 | 15 |
| 1.6 | 14 | 46 | 37.4 | 1.6 | 15 |
| 1.6 | 14 | 45 | 38.4 | 1.6 | 15 |
| 1.6 | 14 | 44 | 39.4 | 1.6 | 15 |
| 1.6 | 14 | 43 | 40.4 | 1.6 | 15 |
| 1.6 | 14 | 42 | 41.4 | 1.6 | 15 |
| 1.6 | 14 | 41 | 42.4 | 1.6 | 15 |
| 1.6 | 14 | 40 | 43.4 | 1.6 | 15 |
| 1.6 | 14 | 39 | 44.4 | 1.6 | 15 |
| 1.6 | 14 | 38 | 45.4 | 1.6 | 15 |
| 1.6 | 14 | 37 | 46.4 | 1.6 | 15 |
| 1.6 | 14 | 36 | 47.4 | 1.6 | 15 |
| 1.6 | 14 | 35 | 48.4 | 1.6 | 15 |
| 1.6 | 14 | 34 | 49.4 | 1.6 | 15 |
| 1.6 | 14 | 33 | 50.4 | 1.6 | 15 |
| 1.6 | 14 | 32 | 51.4 | 1.6 | 15 |
| 1.6 | 14 | 31 | 52.4 | 1.6 | 15 |
| 1.6 | 14 | 30 | 53.4 | 1.6 | 15 |
| 1.8 | 14 | 60 | 23.2 | 1.8 | 15 |
| 1.8 | 14 | 59 | 24.2 | 1.8 | 15 |
| 1.8 | 14 | 58 | 25.2 | 1.8 | 15 |
| 1.8 | 14 | 57 | 26.2 | 1.8 | 15 |
| 1.8 | 14 | 56 | 27.2 | 1.8 | 15 |
| 1.8 | 14 | 55 | 28.2 | 1.8 | 15 |
| 1.8 | 14 | 54 | 29.2 | 1.8 | 15 |
| 1.8 | 14 | 53 | 30.2 | 1.8 | 15 |
| 1.8 | 14 | 52 | 31.2 | 1.8 | 15 |
| 1.8 | 14 | 51 | 32.2 | 1.8 | 15 |
| 1.8 | 14 | 50 | 33.2 | 1.8 | 15 |
| 1.8 | 14 | 49 | 34.2 | 1.8 | 15 |
| 1.8 | 14 | 48 | 35.2 | 1.8 | 15 |
| 1.8 | 14 | 47 | 36.2 | 1.8 | 15 |
| 1.8 | 14 | 46 | 37.2 | 1.8 | 15 |
| 1.8 | 14 | 45 | 38.2 | 1.8 | 15 |
| 1.8 | 14 | 44 | 39.2 | 1.8 | 15 |
| 1.8 | 14 | 43 | 40.2 | 1.8 | 15 |
| 1.8 | 14 | 42 | 41.2 | 1.8 | 15 |
| 1.8 | 14 | 41 | 42.2 | 1.8 | 15 |
| 1.8 | 14 | 40 | 43.2 | 1.8 | 15 |
| 1.8 | 14 | 39 | 44.2 | 1.8 | 15 |
| 1.8 | 14 | 38 | 45.2 | 1.8 | 15 |
| 1.8 | 14 | 37 | 46.2 | 1.8 | 15 |
| 1.8 | 14 | 36 | 47.2 | 1.8 | 15 |
| 1.8 | 14 | 35 | 48.2 | 1.8 | 15 |
| 1.8 | 14 | 34 | 49.2 | 1.8 | 15 |
| 1.8 | 14 | 33 | 50.2 | 1.8 | 15 |
| 1.8 | 14 | 32 | 51.2 | 1.8 | 15 |
| 1.8 | 14 | 31 | 52.2 | 1.8 | 15 |
| 2 | 14 | 30 | 53.2 | 2 | 15 |
| 2 | 14 | 60 | 23 | 2 | 15 |
| 2 | 14 | 59 | 24 | 2 | 15 |
| 2 | 14 | 58 | 25 | 2 | 15 |
| 2 | 14 | 57 | 26 | 2 | 15 |
| 2 | 14 | 56 | 27 | 2 | 15 |
| 2 | 14 | 55 | 28 | 2 | 15 |
| 2 | 14 | 54 | 29 | 2 | 15 |
| 2 | 14 | 53 | 30 | 2 | 15 |
| 2 | 14 | 52 | 31 | 2 | 15 |
| 2 | 14 | 51 | 32 | 2 | 15 |
| 2 | 14 | 50 | 33 | 2 | 15 |
| 2 | 14 | 49 | 34 | 2 | 15 |
| 2 | 14 | 48 | 35 | 2 | 15 |
| 2 | 14 | 47 | 36 | 2 | 15 |
| 2 | 14 | 46 | 37 | 2 | 15 |
| 2 | 14 | 45 | 38 | 2 | 15 |
| 2 | 14 | 44 | 39 | 2 | 15 |
| 2 | 14 | 43 | 40 | 2 | 15 |
| 2 | 14 | 42 | 41 | 2 | 15 |
| 2 | 14 | 41 | 42 | 2 | 15 |
| 2 | 14 | 40 | 43 | 2 | 15 |
| 2 | 14 | 39 | 44 | 2 | 15 |
| 2 | 14 | 38 | 45 | 2 | 15 |
| 2 | 14 | 37 | 46 | 2 | 15 |
| 2 | 14 | 36 | 47 | 2 | 15 |
| 2 | 14 | 35 | 48 | 2 | 15 |
| 2 | 14 | 34 | 49 | 2 | 15 |
| 2 | 14 | 33 | 50 | 2 | 15 |
| 2 | 14 | 32 | 51 | 2 | 15 |
| 2 | 14 | 31 | 52 | 2 | 15 |
| 2 | 14 | 30 | 53 | 2 | 15 |
| 2.2 | 14 | 60 | 22.8 | 2.2 | 15 |
| 2.2 | 14 | 59 | 23.8 | 2.2 | 15 |
| 2.2 | 14 | 58 | 24.8 | 2.2 | 15 |
| 2.2 | 14 | 57 | 25.8 | 2.2 | 15 |
| 2.2 | 14 | 56 | 26.8 | 2.2 | 15 |
| 2.2 | 14 | 55 | 27.8 | 2.2 | 15 |
| 2.2 | 14 | 54 | 28.8 | 2.2 | 15 |
| 2.2 | 14 | 53 | 29.8 | 2.2 | 15 |
| 2.2 | 14 | 52 | 30.8 | 2.2 | 15 |
| 2.2 | 14 | 51 | 31.8 | 2.2 | 15 |
| 2.2 | 14 | 50 | 32.8 | 2.2 | 15 |
| 2.2 | 14 | 49 | 33.8 | 2.2 | 15 |
| 2.2 | 14 | 48 | 34.8 | 2.2 | 15 |
| 2.2 | 14 | 47 | 35.8 | 2.2 | 15 |
| 2.2 | 14 | 46 | 36.8 | 2.2 | 15 |
| 2.2 | 14 | 45 | 37.8 | 2.2 | 15 |
| 2.2 | 14 | 44 | 38.8 | 2.2 | 15 |
| 2.2 | 14 | 43 | 39.8 | 2.2 | 15 |
| 2.2 | 14 | 42 | 40.8 | 2.2 | 15 |
| 2.2 | 14 | 41 | 41.8 | 2.2 | 15 |
| 2.2 | 14 | 40 | 42.8 | 2.2 | 15 |
| 2.2 | 14 | 39 | 43.8 | 2.2 | 15 |
| 2.2 | 14 | 38 | 44.8 | 2.2 | 15 |
| 2.2 | 14 | 37 | 45.8 | 2.2 | 15 |
| 2.2 | 14 | 36 | 46.8 | 2.2 | 15 |
| 2.2 | 14 | 35 | 47.8 | 2.2 | 15 |
| 2.2 | 14 | 34 | 48.8 | 2.2 | 15 |
| 2.2 | 14 | 33 | 49.8 | 2.2 | 15 |
| 2.2 | 14 | 32 | 50.8 | 2.2 | 15 |
| 2.2 | 14 | 31 | 51.8 | 2.2 | 15 |
| 2.2 | 14 | 30 | 52.8 | 2.2 | 15 |
| 2.4 | 14 | 60 | 22.6 | 2.4 | 15 |
| 2.4 | 14 | 59 | 23.6 | 2.4 | 15 |
| 2.4 | 14 | 58 | 24.6 | 2.4 | 15 |
| 2.4 | 14 | 57 | 25.6 | 2.4 | 15 |
| 2.4 | 14 | 56 | 26.6 | 2.4 | 15 |
| 2.4 | 14 | 55 | 27.6 | 2.4 | 15 |
| 2.4 | 14 | 54 | 28.6 | 2.4 | 15 |
| 2.4 | 14 | 53 | 29.6 | 2.4 | 15 |
| 2.4 | 14 | 52 | 30.6 | 2.4 | 15 |
| 2.4 | 14 | 51 | 31.6 | 2.4 | 15 |
| 2.4 | 14 | 50 | 32.6 | 2.4 | 15 |
| 2.4 | 14 | 49 | 33.6 | 2.4 | 15 |
| 2.4 | 14 | 48 | 34.6 | 2.4 | 15 |
| 2.4 | 14 | 47 | 35.6 | 2.4 | 15 |
| 2.4 | 14 | 46 | 36.6 | 2.4 | 15 |
| 2.4 | 14 | 45 | 37.6 | 2.4 | 15 |
| 2.4 | 14 | 44 | 38.6 | 2.4 | 15 |
| 2.4 | 14 | 43 | 39.6 | 2.4 | 15 |
| 2.4 | 14 | 42 | 40.6 | 2.4 | 15 |
| 2.4 | 14 | 41 | 41.6 | 2.4 | 15 |
| 2.4 | 14 | 40 | 42.6 | 2.4 | 15 |
| 2.4 | 14 | 39 | 43.6 | 2.4 | 15 |
| 2.4 | 14 | 38 | 44.6 | 2.4 | 15 |
| 2.4 | 14 | 37 | 45.6 | 2.4 | 15 |
| 2.4 | 14 | 36 | 46.6 | 2.4 | 15 |
| 2.4 | 14 | 35 | 47.6 | 2.4 | 15 |
| 2.4 | 14 | 34 | 48.6 | 2.4 | 15 |
| 2.4 | 14 | 33 | 49.6 | 2.4 | 15 |
| 2.4 | 14 | 32 | 50.6 | 2.4 | 15 |
| 2.4 | 14 | 31 | 51.6 | 2.4 | 15 |
| 2.4 | 14 | 30 | 52.6 | 2.4 | 15 |
| 2.6 | 14 | 60 | 22.4 | 2.6 | 15 |
| 2.6 | 14 | 59 | 23.4 | 2.6 | 15 |
| 2.6 | 14 | 58 | 24.4 | 2.6 | 15 |
| 2.6 | 14 | 57 | 25.4 | 2.6 | 15 |
| 2.6 | 14 | 56 | 26.4 | 2.6 | 15 |
| 2.6 | 14 | 55 | 27.4 | 2.6 | 15 |
| 2.6 | 14 | 54 | 28.4 | 2.6 | 15 |
| 2.6 | 14 | 53 | 29.4 | 2.6 | 15 |
| 2.6 | 14 | 52 | 30.4 | 2.6 | 15 |
| 2.6 | 14 | 51 | 31.4 | 2.6 | 15 |
| 2.6 | 14 | 50 | 32.4 | 2.6 | 15 |
| 2.6 | 14 | 49 | 33.4 | 2.6 | 15 |
| 2.6 | 14 | 48 | 34.4 | 2.6 | 15 |
| 2.6 | 14 | 47 | 35.4 | 2.6 | 15 |
| 2.6 | 14 | 46 | 36.4 | 2.6 | 15 |
| 2.6 | 14 | 45 | 37.4 | 2.6 | 15 |
| 2.6 | 14 | 44 | 38.4 | 2.6 | 15 |
| 2.6 | 14 | 43 | 39.4 | 2.6 | 15 |
| 2.6 | 14 | 42 | 40.4 | 2.6 | 15 |
| 2.6 | 14 | 41 | 41.4 | 2.6 | 15 |
| 2.6 | 14 | 40 | 42.4 | 2.6 | 15 |
| 2.6 | 14 | 39 | 43.4 | 2.6 | 15 |
| 2.6 | 14 | 38 | 44.4 | 2.6 | 15 |
| 2.6 | 14 | 37 | 45.4 | 2.6 | 15 |
| 2.6 | 14 | 36 | 46.4 | 2.6 | 15 |
| 2.6 | 14 | 35 | 47.4 | 2.6 | 15 |
| 2.6 | 14 | 34 | 48.4 | 2.6 | 15 |
| 2.6 | 14 | 33 | 49.4 | 2.6 | 15 |
| 2.6 | 14 | 32 | 50.4 | 2.6 | 15 |
| 2.6 | 14 | 31 | 51.4 | 2.6 | 15 |
| 2.6 | 14 | 30 | 52.4 | 2.6 | 15 |
| 2.8 | 14 | 60 | 22.2 | 2.8 | 15 |
| 2.8 | 14 | 59 | 23.2 | 2.8 | 15 |
| 2.8 | 14 | 58 | 24.2 | 2.8 | 15 |
| 2.8 | 14 | 57 | 25.2 | 2.8 | 15 |
| 2.8 | 14 | 56 | 26.2 | 2.8 | 15 |
| 2.8 | 14 | 55 | 27.2 | 2.8 | 15 |
| 2.8 | 14 | 54 | 28.2 | 2.8 | 15 |
| 2.8 | 14 | 53 | 29.2 | 2.8 | 15 |
| 2.8 | 14 | 52 | 30.2 | 2.8 | 15 |
| 2.8 | 14 | 51 | 31.2 | 2.8 | 15 |
| 2.8 | 14 | 50 | 32.2 | 2.8 | 15 |
| 2.8 | 14 | 49 | 33.2 | 2.8 | 15 |
| 2.8 | 14 | 48 | 34.2 | 2.8 | 15 |
| 2.8 | 14 | 47 | 35.2 | 2.8 | 15 |
| 2.8 | 14 | 46 | 36.2 | 2.8 | 15 |
| 2.8 | 14 | 45 | 37.2 | 2.8 | 15 |
| 2.8 | 14 | 44 | 38.2 | 2.8 | 15 |
| 2.8 | 14 | 43 | 39.2 | 2.8 | 15 |
| 2.8 | 14 | 42 | 40.2 | 2.8 | 15 |
| 2.8 | 14 | 41 | 41.2 | 2.8 | 15 |
| 2.8 | 14 | 40 | 42.2 | 2.8 | 15 |
| 2.8 | 14 | 39 | 43.2 | 2.8 | 15 |
| 2.8 | 14 | 38 | 44.2 | 2.8 | 15 |
| 2.8 | 14 | 37 | 45.2 | 2.8 | 15 |
| 2.8 | 14 | 36 | 46.2 | 2.8 | 15 |
| 2.8 | 14 | 35 | 47.2 | 2.8 | 15 |
| 2.8 | 14 | 34 | 48.2 | 2.8 | 15 |
| 2.8 | 14 | 33 | 49.2 | 2.8 | 15 |
| 2.8 | 14 | 32 | 50.2 | 2.8 | 15 |
| 2.8 | 14 | 31 | 51.2 | 2.8 | 15 |
| 2.8 | 14 | 30 | 52.2 | 2.8 | 15 |
| 3 | 14 | 60 | 22 | 3 | 15 |
| 3 | 14 | 59 | 23 | 3 | 15 |
| 3 | 14 | 58 | 24 | 3 | 15 |
| 3 | 14 | 57 | 25 | 3 | 15 |
| 3 | 14 | 56 | 26 | 3 | 15 |
| 3 | 14 | 55 | 27 | 3 | 15 |
| 3 | 14 | 54 | 28 | 3 | 15 |
| 3 | 14 | 53 | 29 | 3 | 15 |
| 3 | 14 | 52 | 30 | 3 | 15 |
| 3 | 14 | 51 | 31 | 3 | 15 |
| 3 | 14 | 50 | 32 | 3 | 15 |
| 3 | 14 | 49 | 33 | 3 | 15 |
| 3 | 14 | 48 | 34 | 3 | 15 |
| 3 | 14 | 47 | 35 | 3 | 15 |
| 3 | 14 | 46 | 36 | 3 | 15 |
| 3 | 14 | 45 | 37 | 3 | 15 |
| 3 | 14 | 44 | 38 | 3 | 15 |
| 3 | 14 | 43 | 39 | 3 | 15 |
| 3 | 14 | 42 | 40 | 3 | 15 |
| 3 | 14 | 41 | 41 | 3 | 15 |
| 3 | 14 | 40 | 42 | 3 | 15 |
| 3 | 14 | 39 | 43 | 3 | 15 |
| 3 | 14 | 38 | 44 | 3 | 15 |
| 3 | 14 | 37 | 45 | 3 | 15 |
| 3 | 14 | 36 | 46 | 3 | 15 |
| 3 | 14 | 35 | 47 | 3 | 15 |
| 3 | 14 | 34 | 48 | 3 | 15 |
| 3 | 14 | 33 | 49 | 3 | 15 |
| 3 | 14 | 32 | 50 | 3 | 15 |
| 3 | 14 | 31 | 51 | 3 | 15 |
| 3 | 14 | 30 | 52 | 3 | 15 |

### Formulations

[0467] In some embodiments, the formulations comprising the LNP and the recombinant RNA molecules have a ratio of the number of nitrogen in the lipids of the LNP to the phosphorous atoms in the recombinant RNA molecules from: 2.0:1, 2.1:1, 2.2:1, 2.3:1, 2.4:1, 2.5:1, 2.6:1, 2.7:1, 2.8:1, 2.9:1, 3.0:1, 3.1:1, 3.2:1, 3.3:1, 3.4:1, 3.5:1, 3.6:1, 3.7:1, 3.8:1, 3.9:1, 4.0:1, 4.1:1, 4.2:1, 4.3:1, 4.4:1, 4.5:1, 4.6:1, 4.7:1, 4.8:1, 4.9:1, 5.0:1, 5.1:1, 5.2:1, 5.3:1, 5.4:1, 5.5:1, 5.6:1, 5.7:1, 5.8:1, 5.9:1, 6.0:1, 6.1:1, 6.2:1, 6.3:1, 6.4:1, 6.5:1, 6.6:1, 6.7:1, 6.8:1, 6.9:1, 7.0:1, 7.1:1, 7.2:1, 7.3:1, 7.4:1, 7.5:1, 7.6:1, 7.7:1, 7.8:1, 7.9:1, 8.0:1, 8.1:1, 8.2:1, 8.3:1, 8.4:1, 8.5:1, 8.6:1, 8.7:1, 8.8:1, 8.9:1, 9.0:1, 9.1:1, 9.2:1, 9.3:1, 9.4:1, 9.5:1, 9.6:1, 9.7:1, 9.8:1, 9.9:1, 10.0:1, 10.1:1, 10.2:1, 10.3:1, 10.4:1, 10.5:1, 10.6:1, 10.7:1, 10.8:1, 10.9:1, 11.0:1, 11.1:1, 11.2:1, 11.3:1, 11.4:1, 11.5:1, 11.6:1, 11.7:1, 11.8:1, 11.9:1, or 12.0:1. In some embodiments, the formulations comprising the LNP and the recombinant RNA molecules have a ratio of the number of nitrogen in the lipids of the LNP to the phosphorous atoms in the recombinant RNA molecules (N:P) to: 16.0:1, 15.9:1, 15.8:1, 15.7:1, 15.6:1, 15.5:1, 15.4:1, 15.3:1, 15.2:1, 15.1:1, 15.0:1, 14.9:1, 14.8:1, 14.7:1, 14.6:1, 14.5:1, 14.4:1, 14.3:1, 14.2:1, 14.1:1, 14.0:1, 13.9:1, 13.8:1, 13.7:1, 13.6:1, 13.5:1, 13.4:1, 13.3:1, 13.2:1, 13.1:1, 12.0:1, 12.9:1, 12.8:1, 12.7:1, 12.6:1, 12.5:1, 12.4:1, 12.3:1, 12.2:1, 12.1:1, 12.0:1, 11.9:1, 11.8:1, 11.7:1, 11.6:1, 11.5:1, 11.4:1, 11.3:1, 11.2:1, 11.1:1, 11.0:1, 10.9:1, 10.8:1, 10.7:1, 10.6:1, 10.5:1, 10.4:1, 10.3:1, 10.2:1, 10.1:1, 10.0:1, 9.9:1, 9.8:1, 9.7:1, 9.6:1, 9.5:1, 9.4:1, 9.3:1, 9.2:1, 9.1:1, 9.0:1, 8.9:1, 8.8:1, 8.7:1, 8.6:1, 8.5:1, 8.4:1, 8.3:1, 8.2:1, 8.1:1, 8.0:1, 7.9:1, 7.8:1, 7.7:1, 7.6:1, 7.5:1, 7.4:1, 7.3:1, 7.2:1, 7.1:1, 7.0:1, 6.9:1, 6.8:1, 6.7:1, 6.6:1, 6.5:1, 6.4:1, 6.3:1, 6.2:1, 6.1:1, 6.0:1, 5.9:1, 5.8:1, 5.7:1, 5.6:1, 5.5:1, 5.4:1, 5.3:1, 5.2:1, 5.1:1, 5.0:1, 4.9:1, 4.8:1, 4.7:1, 4.6:1, 4.5:1, 4.4:1, 4.3:1, 4.2:1, 4.1:1, or 4.0:1. Taking the above-noted embodiments into account, it is contemplated and supported that any of the above-noted “ratio of the number of nitrogen in the lipids of the LNP to the phosphorous atoms in the recombinant RNA molecules (N:P) from” and “ratio of the number of nitrogen in the lipids of the LNP to the phosphorous atoms in the recombinant RNA molecules (N:P) to” may be combined to provide an enclosed range (i.e. ratio of the number of nitrogen in the lipids of the LNP to the phosphorous atoms in the recombinant RNA molecules (N:P) from 6:1 to 7:1). In some embodiments, the formulations comprising the LNP and the recombinant RNA molecules have a ratio of the number of nitrogen in the lipids of the LNP to the phosphorous atoms in the recombinant RNA molecules from: 2.0:1 to: 2.1:1, 2.2:1, 2.3:1, 2.4:1, 2.5:1, 2.6:1, 2.7:1, 2.8:1, 2.9:1, 3.0:1, 3.1:1, 3.2:1, 3.3:1, 3.4:1, 3.5:1, 3.6:1, 3.7:1, 3.8:1, 3.9:1, 4.0:1, 4.1:1, 4.2:1, 4.3:1, 4.4:1, 4.5:1, 4.6:1, 4.7:1, 4.8:1, 4.9:1, 5.0:1, 5.1:1, 5.2:1, 5.3:1, 5.4:1, 5.5:1, 5.6:1, 5.7:1, 5.8:1, 5.9:1, 6.0:1, 6.1:1, 6.2:1, 6.3:1, 6.4:1, 6.5:1, 6.6:1, 6.7:1, 6.8:1, 6.9:1, 7.0:1, 7.1:1, 7.2:1, 7.3:1, 7.4:1, 7.5:1, 7.6:1, 7.7:1, 7.8:1, 7.9:1, 8.0:1, 8.1:1, 8.2:1, 8.3:1, 8.4:1, 8.5:1, 8.6:1, 8.7:1, 8.8:1, 8.9:1, 9.0:1, 9.1:1, 9.2:1, 9.3:1, 9.4:1, 9.5:1, 9.6:1, 9.7:1, 9.8:1, 9.9:1, 10.0:1, 10.1:1, 10.2:1, 10.3:1, 10.4:1, 10.5:1, 10.6:1, 10.7:1, 10.8:1, 10.9:1, 11.0:1, 11.1:1, 11.2:1, 11.3:1, 11.4:1, 11.5:1, 11.6:1, 11.7:1, 11.8:1, 11.9:1, 12.0:1, 12.1:1, 12.2:1, 12.3:1, 12.4:1, 12.5:1, 12.6:1, 12.7:1, 12.8:1, 12.9:1, 13.0:1, 13.1:1, 13.2:1, 13.3:1, 13.4:1, 13.5:1, 13.6:1, 13.7:1, 13.8:1, 13.9:1, 14.0:1, 14.1:1, 14.2:1, 14.3:1, 14.4:1, 14.5:1, 14.6:1, 14.7:1, 14.8:1, 14.9:1, 15.0:1, 15.1:1, 15.2:1, 15.3:1, 15.4:1, 15.5:1, 15.6:1, 15.7:1, 15.8:1, 15.9:1, or 16.0:1; from 2.1:1 to: 2.2:1, 2.3:1, 2.4:1, 2.5:1, 2.6:1, 2.7:1, 2.8:1, 2.9:1, 3.0:1, 3.1:1, 3.2:1, 3.3:1, 3.4:1, 3.5:1, 3.6:1, 3.7:1, 3.8:1, 3.9:1, 4.0:1, 4.1:1, 4.2:1, 4.3:1, 4.4:1, 4.5:1, 4.6:1, 4.7:1, 4.8:1, 4.9:1, 5.0:1, 5.1:1, 5.2:1, 5.3:1, 5.4:1, 5.5:1, 5.6:1, 5.7:1, 5.8:1, 5.9:1, 6.0:1, 6.1:1, 6.2:1, 6.3:1, 6.4:1, 6.5:1, 6.6:1, 6.7:1, 6.8:1, 6.9:1, 7.0:1, 7.1:1, 7.2:1, 7.3:1, 7.4:1, 7.5:1, 7.6:1, 7.7:1, 7.8:1, 7.9:1, 8.0:1, 8.1:1, 8.2:1, 8.3:1, 8.4:1, 8.5:1, 8.6:1, 8.7:1, 8.8:1, 8.9:1, 9.0:1, 9.1:1, 9.2:1, 9.3:1, 9.4:1, 9.5:1, 9.6:1, 9.7:1, 9.8:1, 9.9:1, 10.0:1, 10.1:1, 10.2:1, 10.3:1, 10.4:1, 10.5:1, 10.6:1, 10.7:1, 10.8:1, 10.9:1, 11.0:1, 11.1:1, 11.2:1, 11.3:1, 11.4:1, 11.5:1, 11.6:1, 11.7:1, 11.8:1, 11.9:1, 12.0:1, 12.1:1, 12.2:1, 12.3:1, 12.4:1, 12.5:1, 12.6:1, 12.7:1, 12.8:1, 12.9:1, 13.0:1, 13.1:1, 13.2:1, 13.3:1, 13.4:1, 13.5:1, 13.6:1, 13.7:1, 13.8:1, 13.9:1, 14.0:1, 14.1:1, 14.2:1, 14.3:1, 14.4:1, 14.5:1, 14.6:1, 14.7:1, 14.8:1, 14.9:1, 15.0:1, 15.1:1, 15.2:1, 15.3:1, 15.4:1, 15.5:1, 15.6:1, 15.7:1, 15.8:1, 15.9:1, or 16.0:1; from 2.2:1 to: 2.3:1, 2.4:1, 2.5:1, 2.6:1, 2.7:1, 2.8:1, 2.9:1, 3.0:1, 3.1:1, 3.2:1, 3.3:1, 3.4:1, 3.5:1, 3.6:1, 3.7:1, 3.8:1, 3.9:1, 4.0:1, 4.1:1, 4.2:1, 4.3:1, 4.4:1, 4.5:1, 4.6:1, 4.7:1, 4.8:1, 4.9:1, 5.0:1, 5.1:1, 5.2:1, 5.3:1, 5.4:1, 5.5:1, 5.6:1, 5.7:1, 5.8:1, 5.9:1, 6.0:1, 6.1:1, 6.2:1, 6.3:1, 6.4:1, 6.5:1, 6.6:1, 6.7:1, 6.8:1, 6.9:1, 7.0:1, 7.1:1, 7.2:1, 7.3:1, 7.4:1, 7.5:1, 7.6:1, 7.7:1, 7.8:1, 7.9:1, 8.0:1, 8.1:1, 8.2:1, 8.3:1, 8.4:1, 8.5:1, 8.6:1, 8.7:1, 8.8:1, 8.9:1, 9.0:1, 9.1:1, 9.2:1, 9.3:1, 9.4:1, 9.5:1, 9.6:1, 9.7:1, 9.8:1, 9.9:1, 10.0:1, 10.1:1, 10.2:1, 10.3:1, 10.4:1, 10.5:1, 10.6:1, 10.7:1, 10.8:1, 10.9:1, 11.0:1, 11.1:1, 11.2:1, 11.3:1, 11.4:1, 11.5:1, 11.6:1, 11.7:1, 11.8:1, 11.9:1, 12.0:1, 12.1:1, 12.2:1, 12.3:1, 12.4:1, 12.5:1, 12.6:1, 12.7:1, 12.8:1, 12.9:1, 13.0:1, 13.1:1, 13.2:1, 13.3:1, 13.4:1, 13.5:1, 13.6:1, 13.7:1, 13.8:1, 13.9:1, 14.0:1, 14.1:1, 14.2:1, 14.3:1, 14.4:1, 14.5:1, 14.6:1, 14.7:1, 14.8:1, 14.9:1, 15.0:1, 15.1:1, 15.2:1, 15.3:1, 15.4:1, 15.5:1, 15.6:1, 15.7:1, 15.8:1, 15.9:1, or 16.0:1; from 2.3:1 to: 2.4:1, 2.5:1, 2.6:1, 2.7:1, 2.8:1, 2.9:1, 3.0:1, 3.1:1, 3.2:1, 3.3:1, 3.4:1, 3.5:1, 3.6:1, 3.7:1, 3.8:1, 3.9:1, 4.0:1, 4.1:1, 4.2:1, 4.3:1, 4.4:1, 4.5:1, 4.6:1, 4.7:1, 4.8:1, 4.9:1, 5.0:1, 5.1:1, 5.2:1, 5.3:1, 5.4:1, 5.5:1, 5.6:1, 5.7:1, 5.8:1, 5.9:1, 6.0:1, 6.1:1, 6.2:1, 6.3:1, 6.4:1, 6.5:1, 6.6:1, 6.7:1, 6.8:1, 6.9:1, 7.0:1, 7.1:1, 7.2:1, 7.3:1, 7.4:1, 7.5:1, 7.6:1, 7.7:1, 7.8:1, 7.9:1, 8.0:1, 8.1:1, 8.2:1, 8.3:1, 8.4:1, 8.5:1, 8.6:1, 8.7:1, 8.8:1, 8.9:1, 9.0:1, 9.1:1, 9.2:1, 9.3:1, 9.4:1, 9.5:1, 9.6:1, 9.7:1, 9.8:1, 9.9:1, 10.0:1, 10.1:1, 10.2:1, 10.3:1, 10.4:1, 10.5:1, 10.6:1, 10.7:1, 10.8:1, 10.9:1, 11.0:1, 11.1:1, 11.2:1, 11.3:1, 11.4:1, 11.5:1, 11.6:1, 11.7:1, 11.8:1, 11.9:1, 12.0:1, 12.1:1, 12.2:1, 12.3:1, 12.4:1, 12.5:1, 12.6:1, 12.7:1, 12.8:1, 12.9:1, 13.0:1, 13.1:1, 13.2:1, 13.3:1, 13.4:1, 13.5:1, 13.6:1, 13.7:1, 13.8:1, 13.9:1, 14.0:1, 14.1:1, 14.2:1, 14.3:1, 14.4:1, 14.5:1, 14.6:1, 14.7:1, 14.8:1, 14.9:1, 15.0:1, 15.1:1, 15.2:1, 15.3:1, 15.4:1, 15.5:1, 15.6:1, 15.7:1, 15.8:1, 15.9:1, or 16.0:1; from 2.4:1 to: 2.5:1, 2.6:1, 2.7:1, 2.8:1, 2.9:1, 3.0:1, 3.1:1, 3.2:1, 3.3:1, 3.4:1, 3.5:1, 3.6:1, 3.7:1, 3.8:1, 3.9:1, 4.0:1, 4.1:1, 4.2:1, 4.3:1, 4.4:1, 4.5:1, 4.6:1, 4.7:1, 4.8:1, 4.9:1, 5.0:1, 5.1:1, 5.2:1, 5.3:1, 5.4:1, 5.5:1, 5.6:1, 5.7:1, 5.8:1, 5.9:1, 6.0:1, 6.1:1, 6.2:1, 6.3:1, 6.4:1, 6.5:1, 6.6:1, 6.7:1, 6.8:1, 6.9:1, 7.0:1, 7.1:1, 7.2:1, 7.3:1, 7.4:1, 7.5:1, 7.6:1, 7.7:1, 7.8:1, 7.9:1, 8.0:1, 8.1:1, 8.2:1, 8.3:1, 8.4:1, 8.5:1, 8.6:1, 8.7:1, 8.8:1, 8.9:1, 9.0:1, 9.1:1, 9.2:1, 9.3:1, 9.4:1, 9.5:1, 9.6:1, 9.7:1, 9.8:1, 9.9:1, 10.0:1, 10.1:1, 10.2:1, 10.3:1, 10.4:1, 10.5:1, 10.6:1, 10.7:1, 10.8:1, 10.9:1, 11.0:1, 11.1:1, 11.2:1, 11.3:1, 11.4:1, 11.5:1, 11.6:1, 11.7:1, 11.8:1, 11.9:1, 12.0:1, 12.1:1, 12.2:1, 12.3:1, 12.4:1, 12.5:1, 12.6:1, 12.7:1, 12.8:1, 12.9:1, 13.0:1, 13.1:1, 13.2:1, 13.3:1, 13.4:1, 13.5:1, 13.6:1, 13.7:1, 13.8:1, 13.9:1, 14.0:1, 14.1:1, 14.2:1, 14.3:1, 14.4:1, 14.5:1, 14.6:1, 14.7:1, 14.8:1, 14.9:1, 15.0:1, 15.1:1, 15.2:1, 15.3:1, 15.4:1, 15.5:1, 15.6:1, 15.7:1, 15.8:1, 15.9:1, or 16.0:1; from 2.5:1 to: 2.6:1, 2.7:1, 2.8:1, 2.9:1, 3.0:1, 3.1:1, 3.2:1, 3.3:1, 3.4:1, 3.5:1, 3.6:1, 3.7:1, 3.8:1, 3.9:1, 4.0:1, 4.1:1, 4.2:1, 4.3:1, 4.4:1, 4.5:1, 4.6:1, 4.7:1, 4.8:1, 4.9:1, 5.0:1, 5.1:1, 5.2:1, 5.3:1, 5.4:1, 5.5:1, 5.6:1, 5.7:1, 5.8:1, 5.9:1, 6.0:1, 6.1:1, 6.2:1, 6.3:1, 6.4:1, 6.5:1, 6.6:1, 6.7:1, 6.8:1, 6.9:1, 7.0:1, 7.1:1, 7.2:1, 7.3:1, 7.4:1, 7.5:1, 7.6:1, 7.7:1, 7.8:1, 7.9:1, 8.0:1, 8.1:1, 8.2:1, 8.3:1, 8.4:1, 8.5:1, 8.6:1, 8.7:1, 8.8:1, 8.9:1, 9.0:1, 9.1:1, 9.2:1, 9.3:1, 9.4:1, 9.5:1, 9.6:1, 9.7:1, 9.8:1, 9.9:1, 10.0:1, 10.1:1, 10.2:1, 10.3:1, 10.4:1, 10.5:1, 10.6:1, 10.7:1, 10.8:1, 10.9:1, 11.0:1, 11.1:1, 11.2:1, 11.3:1, 11.4:1, 11.5:1, 11.6:1, 11.7:1, 11.8:1, 11.9:1, 12.0:1, 12.1:1, 12.2:1, 12.3:1, 12.4:1, 12.5:1, 12.6:1, 12.7:1, 12.8:1, 12.9:1, 13.0:1, 13.1:1, 13.2:1, 13.3:1, 13.4:1, 13.5:1, 13.6:1, 13.7:1, 13.8:1, 13.9:1, 14.0:1, 14.1:1, 14.2:1, 14.3:1, 14.4:1, 14.5:1, 14.6:1, 14.7:1, 14.8:1, 14.9:1, 15.0:1, 15.1:1, 15.2:1, 15.3:1, 15.4:1, 15.5:1, 15.6:1, 15.7:1, 15.8:1, 15.9:1, or 16.0:1; from 2.6:1 to: 2.7:1, 2.8:1, 2.9:1, 3.0:1, 3.1:1, 3.2:1, 3.3:1, 3.4:1, 3.5:1, 3.6:1, 3.7:1, 3.8:1, 3.9:1, 4.0:1, 4.1:1, 4.2:1, 4.3:1, 4.4:1, 4.5:1, 4.6:1, 4.7:1, 4.8:1, 4.9:1, 5.0:1, 5.1:1, 5.2:1, 5.3:1, 5.4:1, 5.5:1, 5.6:1, 5.7:1, 5.8:1, 5.9:1, 6.0:1, 6.1:1, 6.2:1, 6.3:1, 6.4:1, 6.5:1, 6.6:1, 6.7:1, 6.8:1, 6.9:1, 7.0:1, 7.1:1, 7.2:1, 7.3:1, 7.4:1, 7.5:1, 7.6:1, 7.7:1, 7.8:1, 7.9:1, 8.0:1, 8.1:1, 8.2:1, 8.3:1, 8.4:1, 8.5:1, 8.6:1, 8.7:1, 8.8:1, 8.9:1, 9.0:1, 9.1:1, 9.2:1, 9.3:1, 9.4:1, 9.5:1, 9.6:1, 9.7:1, 9.8:1, 9.9:1, 10.0:1, 10.1:1, 10.2:1, 10.3:1, 10.4:1, 10.5:1, 10.6:1, 10.7:1, 10.8:1, 10.9:1, 11.0:1, 11.1:1, 11.2:1, 11.3:1, 11.4:1, 11.5:1, 11.6:1, 11.7:1, 11.8:1, 11.9:1, 12.0:1, 12.1:1, 12.2:1, 12.3:1, 12.4:1, 12.5:1, 12.6:1, 12.7:1, 12.8:1, 12.9:1, 13.0:1, 13.1:1, 13.2:1, 13.3:1, 13.4:1, 13.5:1, 13.6:1, 13.7:1, 13.8:1, 13.9:1, 14.0:1, 14.1:1, 14.2:1, 14.3:1, 14.4:1, 14.5:1, 14.6:1, 14.7:1, 14.8:1, 14.9:1, 15.0:1, 15.1:1, 15.2:1, 15.3:1, 15.4:1, 15.5:1, 15.6:1, 15.7:1, 15.8:1, 15.9:1, or 16.0:1; from 2.7:1 to: 2.8:1, 2.9:1, 3.0:1, 3.1:1, 3.2:1, 3.3:1, 3.4:1, 3.5:1, 3.6:1, 3.7:1, 3.8:1, 3.9:1, 4.0:1, 4.1:1, 4.2:1, 4.3:1, 4.4:1, 4.5:1, 4.6:1, 4.7:1, 4.8:1, 4.9:1, 5.0:1, 5.1:1, 5.2:1, 5.3:1, 5.4:1, 5.5:1, 5.6:1, 5.7:1, 5.8:1, 5.9:1, 6.0:1, 6.1:1, 6.2:1, 6.3:1, 6.4:1, 6.5:1, 6.6:1, 6.7:1, 6.8:1, 6.9:1, 7.0:1, 7.1:1, 7.2:1, 7.3:1, 7.4:1, 7.5:1, 7.6:1, 7.7:1, 7.8:1, 7.9:1, 8.0:1, 8.1:1, 8.2:1, 8.3:1, 8.4:1, 8.5:1, 8.6:1, 8.7:1, 8.8:1, 8.9:1, 9.0:1, 9.1:1, 9.2:1, 9.3:1, 9.4:1, 9.5:1, 9.6:1, 9.7:1, 9.8:1, 9.9:1, 10.0:1, 10.1:1, 10.2:1, 10.3:1, 10.4:1, 10.5:1, 10.6:1, 10.7:1, 10.8:1, 10.9:1, 11.0:1, 11.1:1, 11.2:1, 11.3:1, 11.4:1, 11.5:1, 11.6:1, 11.7:1, 11.8:1, 11.9:1, 12.0:1, 12.1:1, 12.2:1, 12.3:1, 12.4:1, 12.5:1, 12.6:1, 12.7:1, 12.8:1, 12.9:1, 13.0:1, 13.1:1, 13.2:1, 13.3:1, 13.4:1, 13.5:1, 13.6:1, 13.7:1, 13.8:1, 13.9:1, 14.0:1, 14.1:1, 14.2:1, 14.3:1, 14.4:1, 14.5:1, 14.6:1, 14.7:1, 14.8:1, 14.9:1, 15.0:1, 15.1:1, 15.2:1, 15.3:1, 15.4:1, 15.5:1, 15.6:1, 15.7:1, 15.8:1, 15.9:1, or 16.0:1; from 2.8:1 to: 2.9:1, 3.0:1, 3.1:1, 3.2:1, 3.3:1, 3.4:1, 3.5:1, 3.6:1, 3.7:1, 3.8:1, 3.9:1, 4.0:1, 4.1:1, 4.2:1, 4.3:1, 4.4:1, 4.5:1, 4.6:1, 4.7:1, 4.8:1, 4.9:1, 5.0:1, 5.1:1, 5.2:1, 5.3:1, 5.4:1, 5.5:1, 5.6:1, 5.7:1, 5.8:1, 5.9:1, 6.0:1, 6.1:1, 6.2:1, 6.3:1, 6.4:1, 6.5:1, 6.6:1, 6.7:1, 6.8:1, 6.9:1, 7.0:1, 7.1:1, 7.2:1, 7.3:1, 7.4:1, 7.5:1, 7.6:1, 7.7:1, 7.8:1, 7.9:1, 8.0:1, 8.1:1, 8.2:1, 8.3:1, 8.4:1, 8.5:1, 8.6:1, 8.7:1, 8.8:1, 8.9:1, 9.0:1, 9.1:1, 9.2:1, 9.3:1, 9.4:1, 9.5:1, 9.6:1, 9.7:1, 9.8:1, 9.9:1, 10.0:1, 10.1:1, 10.2:1, 10.3:1, 10.4:1, 10.5:1, 10.6:1, 10.7:1, 10.8:1, 10.9:1, 11.0:1, 11.1:1, 11.2:1, 11.3:1, 11.4:1, 11.5:1, 11.6:1, 11.7:1, 11.8:1, 11.9:1, 12.0:1, 12.1:1, 12.2:1, 12.3:1, 12.4:1, 12.5:1, 12.6:1, 12.7:1, 12.8:1, 12.9:1, 13.0:1, 13.1:1, 13.2:1, 13.3:1, 13.4:1, 13.5:1, 13.6:1, 13.7:1, 13.8:1, 13.9:1, 14.0:1, 14.1:1, 14.2:1, 14.3:1, 14.4:1, 14.5:1, 14.6:1, 14.7:1, 14.8:1, 14.9:1, 15.0:1, 15.1:1, 15.2:1, 15.3:1, 15.4:1, 15.5:1, 15.6:1, 15.7:1, 15.8:1, 15.9:1, or 16.0:1; from 2.9:1 to: 3.0:1, 3.1:1, 3.2:1, 3.3:1, 3.4:1, 3.5:1, 3.6:1, 3.7:1, 3.8:1, 3.9:1, 4.0:1, 4.1:1, 4.2:1, 4.3:1, 4.4:1, 4.5:1, 4.6:1, 4.7:1, 4.8:1, 4.9:1, 5.0:1, 5.1:1, 5.2:1, 5.3:1, 5.4:1, 5.5:1, 5.6:1, 5.7:1, 5.8:1, 5.9:1, 6.0:1, 6.1:1, 6.2:1, 6.3:1, 6.4:1, 6.5:1, 6.6:1, 6.7:1, 6.8:1, 6.9:1, 7.0:1, 7.1:1, 7.2:1, 7.3:1, 7.4:1, 7.5:1, 7.6:1, 7.7:1, 7.8:1, 7.9:1, 8.0:1, 8.1:1, 8.2:1, 8.3:1, 8.4:1, 8.5:1, 8.6:1, 8.7:1, 8.8:1, 8.9:1, 9.0:1, 9.1:1, 9.2:1, 9.3:1, 9.4:1, 9.5:1, 9.6:1, 9.7:1, 9.8:1, 9.9:1, 10.0:1, 10.1:1, 10.2:1, 10.3:1, 10.4:1, 10.5:1, 10.6:1, 10.7:1, 10.8:1, 10.9:1, 11.0:1, 11.1:1, 11.2:1, 11.3:1, 11.4:1, 11.5:1, 11.6:1, 11.7:1, 11.8:1, 11.9:1, 12.0:1, 12.1:1, 12.2:1, 12.3:1, 12.4:1, 12.5:1, 12.6:1, 12.7:1, 12.8:1, 12.9:1, 13.0:1, 13.1:1, 13.2:1, 13.3:1, 13.4:1, 13.5:1, 13.6:1, 13.7:1, 13.8:1, 13.9:1, 14.0:1, 14.1:1, 14.2:1, 14.3:1, 14.4:1, 14.5:1, 14.6:1, 14.7:1, 14.8:1, 14.9:1, 15.0:1, 15.1:1, 15.2:1, 15.3:1, 15.4:1, 15.5:1, 15.6:1, 15.7:1, 15.8:1, 15.9:1, or 16.0:1; from 3.0:1 to: 3.1:1, 3.2:1, 3.3:1, 3.4:1, 3.5:1, 3.6:1, 3.7:1, 3.8:1, 3.9:1, 4.0:1, 4.1:1, 4.2:1, 4.3:1, 4.4:1, 4.5:1, 4.6:1, 4.7:1, 4.8:1, 4.9:1, 5.0:1, 5.1:1, 5.2:1, 5.3:1, 5.4:1, 5.5:1, 5.6:1, 5.7:1, 5.8:1, 5.9:1, 6.0:1, 6.1:1, 6.2:1, 6.3:1, 6.4:1, 6.5:1, 6.6:1, 6.7:1, 6.8:1, 6.9:1, 7.0:1, 7.1:1, 7.2:1, 7.3:1, 7.4:1, 7.5:1, 7.6:1, 7.7:1, 7.8:1, 7.9:1, 8.0:1, 8.1:1, 8.2:1, 8.3:1, 8.4:1, 8.5:1, 8.6:1, 8.7:1, 8.8:1, 8.9:1, 9.0:1, 9.1:1, 9.2:1, 9.3:1, 9.4:1, 9.5:1, 9.6:1, 9.7:1, 9.8:1, 9.9:1, 10.0:1, 10.1:1, 10.2:1, 10.3:1, 10.4:1, 10.5:1, 10.6:1, 10.7:1, 10.8:1, 10.9:1, 11.0:1, 11.1:1, 11.2:1, 11.3:1, 11.4:1, 11.5:1, 11.6:1, 11.7:1, 11.8:1, 11.9:1, 12.0:1, 12.1:1, 12.2:1, 12.3:1, 12.4:1, 12.5:1, 12.6:1, 12.7:1, 12.8:1, 12.9:1, 13.0:1, 13.1:1, 13.2:1, 13.3:1, 13.4:1, 13.5:1, 13.6:1, 13.7:1, 13.8:1, 13.9:1, 14.0:1, 14.1:1, 14.2:1, 14.3:1, 14.4:1, 14.5:1, 14.6:1, 14.7:1, 14.8:1, 14.9:1, 15.0:1, 15.1:1, 15.2:1, 15.3:1, 15.4:1, 15.5:1, 15.6:1, 15.7:1, 15.8:1, 15.9:1, or 16.0:1; from 3.1:1 to: 3.2:1, 3.3:1, 3.4:1, 3.5:1, 3.6:1, 3.7:1, 3.8:1, 3.9:1, 4.0:1, 4.1:1, 4.2:1, 4.3:1, 4.4:1, 4.5:1, 4.6:1, 4.7:1, 4.8:1, 4.9:1, 5.0:1, 5.1:1, 5.2:1, 5.3:1, 5.4:1, 5.5:1, 5.6:1, 5.7:1, 5.8:1, 5.9:1, 6.0:1, 6.1:1, 6.2:1, 6.3:1, 6.4:1, 6.5:1, 6.6:1, 6.7:1, 6.8:1, 6.9:1, 7.0:1, 7.1:1, 7.2:1, 7.3:1, 7.4:1, 7.5:1, 7.6:1, 7.7:1, 7.8:1, 7.9:1, 8.0:1, 8.1:1, 8.2:1, 8.3:1, 8.4:1, 8.5:1, 8.6:1, 8.7:1, 8.8:1, 8.9:1, 9.0:1, 9.1:1, 9.2:1, 9.3:1, 9.4:1, 9.5:1, 9.6:1, 9.7:1, 9.8:1, 9.9:1, 10.0:1, 10.1:1, 10.2:1, 10.3:1, 10.4:1, 10.5:1, 10.6:1, 10.7:1, 10.8:1, 10.9:1, 11.0:1, 11.1:1, 11.2:1, 11.3:1, 11.4:1, 11.5:1, 11.6:1, 11.7:1, 11.8:1, 11.9:1, 12.0:1, 12.1:1, 12.2:1, 12.3:1, 12.4:1, 12.5:1, 12.6:1, 12.7:1, 12.8:1, 12.9:1, 13.0:1, 13.1:1, 13.2:1, 13.3:1, 13.4:1, 13.5:1, 13.6:1, 13.7:1, 13.8:1, 13.9:1, 14.0:1, 14.1:1, 14.2:1, 14.3:1, 14.4:1, 14.5:1, 14.6:1, 14.7:1, 14.8:1, 14.9:1, 15.0:1, 15.1:1, 15.2:1, 15.3:1, 15.4:1, 15.5:1, 15.6:1, 15.7:1, 15.8:1, 15.9:1, or 16.0:1; from 3.2:1 to: 3.3:1, 3.4:1, 3.5:1, 3.6:1, 3.7:1, 3.8:1, 3.9:1, 4.0:1, 4.1:1, 4.2:1, 4.3:1, 4.4:1, 4.5:1, 4.6:1, 4.7:1, 4.8:1, 4.9:1, 5.0:1, 5.1:1, 5.2:1, 5.3:1, 5.4:1, 5.5:1, 5.6:1, 5.7:1, 5.8:1, 5.9:1, 6.0:1, 6.1:1, 6.2:1, 6.3:1, 6.4:1, 6.5:1, 6.6:1, 6.7:1, 6.8:1, 6.9:1, 7.0:1, 7.1:1, 7.2:1, 7.3:1, 7.4:1, 7.5:1, 7.6:1, 7.7:1, 7.8:1, 7.9:1, 8.0:1, 8.1:1, 8.2:1, 8.3:1, 8.4:1, 8.5:1, 8.6:1, 8.7:1, 8.8:1, 8.9:1, 9.0:1, 9.1:1, 9.2:1, 9.3:1, 9.4:1, 9.5:1, 9.6:1, 9.7:1, 9.8:1, 9.9:1, 10.0:1, 10.1:1, 10.2:1, 10.3:1, 10.4:1, 10.5:1, 10.6:1, 10.7:1, 10.8:1, 10.9:1, 11.0:1, 11.1:1, 11.2:1, 11.3:1, 11.4:1, 11.5:1, 11.6:1, 11.7:1, 11.8:1, 11.9:1, 12.0:1, 12.1:1, 12.2:1, 12.3:1, 12.4:1, 12.5:1, 12.6:1, 12.7:1, 12.8:1, 12.9:1, 13.0:1, 13.1:1, 13.2:1, 13.3:1, 13.4:1, 13.5:1, 13.6:1, 13.7:1, 13.8:1, 13.9:1, 14.0:1, 14.1:1, 14.2:1, 14.3:1, 14.4:1, 14.5:1, 14.6:1, 14.7:1, 14.8:1, 14.9:1, 15.0:1, 15.1:1, 15.2:1, 15.3:1, 15.4:1, 15.5:1, 15.6:1, 15.7:1, 15.8:1, 15.9:1, or 16.0:1; from 3.3:1 to: 3.4:1, 3.5:1, 3.6:1, 3.7:1, 3.8:1, 3.9:1, 4.0:1, 4.1:1, 4.2:1, 4.3:1, 4.4:1, 4.5:1, 4.6:1, 4.7:1, 4.8:1, 4.9:1, 5.0:1, 5.1:1, 5.2:1, 5.3:1, 5.4:1, 5.5:1, 5.6:1, 5.7:1, 5.8:1, 5.9:1, 6.0:1, 6.1:1, 6.2:1, 6.3:1, 6.4:1, 6.5:1, 6.6:1, 6.7:1, 6.8:1, 6.9:1, 7.0:1, 7.1:1, 7.2:1, 7.3:1, 7.4:1, 7.5:1, 7.6:1, 7.7:1, 7.8:1, 7.9:1, 8.0:1, 8.1:1, 8.2:1, 8.3:1, 8.4:1, 8.5:1, 8.6:1, 8.7:1, 8.8:1, 8.9:1, 9.0:1, 9.1:1, 9.2:1, 9.3:1, 9.4:1, 9.5:1, 9.6:1, 9.7:1, 9.8:1, 9.9:1, 10.0:1, 10.1:1, 10.2:1, 10.3:1, 10.4:1, 10.5:1, 10.6:1, 10.7:1, 10.8:1, 10.9:1, 11.0:1, 11.1:1, 11.2:1, 11.3:1, 11.4:1, 11.5:1, 11.6:1, 11.7:1, 11.8:1, 11.9:1, 12.0:1, 12.1:1, 12.2:1, 12.3:1, 12.4:1, 12.5:1, 12.6:1, 12.7:1, 12.8:1, 12.9:1, 13.0:1, 13.1:1, 13.2:1, 13.3:1, 13.4:1, 13.5:1, 13.6:1, 13.7:1, 13.8:1, 13.9:1, 14.0:1, 14.1:1, 14.2:1, 14.3:1, 14.4:1, 14.5:1, 14.6:1, 14.7:1, 14.8:1, 14.9:1, 15.0:1, 15.1:1, 15.2:1, 15.3:1, 15.4:1, 15.5:1, 15.6:1, 15.7:1, 15.8:1, 15.9:1, or 16.0:1; from 3.4:1 to: 3.5:1, 3.6:1, 3.7:1, 3.8:1, 3.9:1, 4.0:1, 4.1:1, 4.2:1, 4.3:1, 4.4:1, 4.5:1, 4.6:1, 4.7:1, 4.8:1, 4.9:1, 5.0:1, 5.1:1, 5.2:1, 5.3:1, 5.4:1, 5.5:1, 5.6:1, 5.7:1, 5.8:1, 5.9:1, 6.0:1, 6.1:1, 6.2:1, 6.3:1, 6.4:1, 6.5:1, 6.6:1, 6.7:1, 6.8:1, 6.9:1, 7.0:1, 7.1:1, 7.2:1, 7.3:1, 7.4:1, 7.5:1, 7.6:1, 7.7:1, 7.8:1, 7.9:1, 8.0:1, 8.1:1, 8.2:1, 8.3:1, 8.4:1, 8.5:1, 8.6:1, 8.7:1, 8.8:1, 8.9:1, 9.0:1, 9.1:1, 9.2:1, 9.3:1, 9.4:1, 9.5:1, 9.6:1, 9.7:1, 9.8:1, 9.9:1, 10.0:1, 10.1:1, 10.2:1, 10.3:1, 10.4:1, 10.5:1, 10.6:1, 10.7:1, 10.8:1, 10.9:1, 11.0:1, 11.1:1, 11.2:1, 11.3:1, 11.4:1, 11.5:1, 11.6:1, 11.7:1, 11.8:1, 11.9:1, 12.0:1, 12.1:1, 12.2:1, 12.3:1, 12.4:1, 12.5:1, 12.6:1, 12.7:1, 12.8:1, 12.9:1, 13.0:1, 13.1:1, 13.2:1, 13.3:1, 13.4:1, 13.5:1, 13.6:1, 13.7:1, 13.8:1, 13.9:1, 14.0:1, 14.1:1, 14.2:1, 14.3:1, 14.4:1, 14.5:1, 14.6:1, 14.7:1, 14.8:1, 14.9:1, 15.0:1, 15.1:1, 15.2:1, 15.3:1, 15.4:1, 15.5:1, 15.6:1, 15.7:1, 15.8:1, 15.9:1, or 16.0:1; from 3.5:1 to: 3.6:1, 3.7:1, 3.8:1, 3.9:1, 4.0:1, 4.1:1, 4.2:1, 4.3:1, 4.4:1, 4.5:1, 4.6:1, 4.7:1, 4.8:1, 4.9:1, 5.0:1, 5.1:1, 5.2:1, 5.3:1, 5.4:1, 5.5:1, 5.6:1, 5.7:1, 5.8:1, 5.9:1, 6.0:1, 6.1:1, 6.2:1, 6.3:1, 6.4:1, 6.5:1, 6.6:1, 6.7:1, 6.8:1, 6.9:1, 7.0:1, 7.1:1, 7.2:1, 7.3:1, 7.4:1, 7.5:1, 7.6:1, 7.7:1, 7.8:1, 7.9:1, 8.0:1, 8.1:1, 8.2:1, 8.3:1, 8.4:1, 8.5:1, 8.6:1, 8.7:1, 8.8:1, 8.9:1, 9.0:1, 9.1:1, 9.2:1, 9.3:1, 9.4:1, 9.5:1, 9.6:1, 9.7:1, 9.8:1, 9.9:1, 10.0:1, 10.1:1, 10.2:1, 10.3:1, 10.4:1, 10.5:1, 10.6:1, 10.7:1, 10.8:1, 10.9:1, 11.0:1, 11.1:1, 11.2:1, 11.3:1, 11.4:1, 11.5:1, 11.6:1, 11.7:1, 11.8:1, 11.9:1, 12.0:1, 12.1:1, 12.2:1, 12.3:1, 12.4:1, 12.5:1, 12.6:1, 12.7:1, 12.8:1, 12.9:1, 13.0:1, 13.1:1, 13.2:1, 13.3:1, 13.4:1, 13.5:1, 13.6:1, 13.7:1, 13.8:1, 13.9:1, 14.0:1, 14.1:1, 14.2:1, 14.3:1, 14.4:1, 14.5:1, 14.6:1, 14.7:1, 14.8:1, 14.9:1, 15.0:1, 15.1:1, 15.2:1, 15.3:1, 15.4:1, 15.5:1, 15.6:1, 15.7:1, 15.8:1, 15.9:1, or 16.0:1; from 3.6:1 to: 3.7:1, 3.8:1, 3.9:1, 4.0:1, 4.1:1, 4.2:1, 4.3:1, 4.4:1, 4.5:1, 4.6:1, 4.7:1, 4.8:1, 4.9:1, 5.0:1, 5.1:1, 5.2:1, 5.3:1, 5.4:1, 5.5:1, 5.6:1, 5.7:1, 5.8:1, 5.9:1, 6.0:1, 6.1:1, 6.2:1, 6.3:1, 6.4:1, 6.5:1, 6.6:1, 6.7:1, 6.8:1, 6.9:1, 7.0:1, 7.1:1, 7.2:1, 7.3:1, 7.4:1, 7.5:1, 7.6:1, 7.7:1, 7.8:1, 7.9:1, 8.0:1, 8.1:1, 8.2:1, 8.3:1, 8.4:1, 8.5:1, 8.6:1, 8.7:1, 8.8:1, 8.9:1, 9.0:1, 9.1:1, 9.2:1, 9.3:1, 9.4:1, 9.5:1, 9.6:1, 9.7:1, 9.8:1, 9.9:1, 10.0:1, 10.1:1, 10.2:1, 10.3:1, 10.4:1, 10.5:1, 10.6:1, 10.7:1, 10.8:1, 10.9:1, 11.0:1, 11.1:1, 11.2:1, 11.3:1, 11.4:1, 11.5:1, 11.6:1, 11.7:1, 11.8:1, 11.9:1, 12.0:1, 12.1:1, 12.2:1, 12.3:1, 12.4:1, 12.5:1, 12.6:1, 12.7:1, 12.8:1, 12.9:1, 13.0:1, 13.1:1, 13.2:1, 13.3:1, 13.4:1, 13.5:1, 13.6:1, 13.7:1, 13.8:1, 13.9:1, 14.0:1, 14.1:1, 14.2:1, 14.3:1, 14.4:1, 14.5:1, 14.6:1, 14.7:1, 14.8:1, 14.9:1, 15.0:1, 15.1:1, 15.2:1, 15.3:1, 15.4:1, 15.5:1, 15.6:1, 15.7:1, 15.8:1, 15.9:1, or 16.0:1; from 3.7:1 to: 3.8:1, 3.9:1, 4.0:1, 4.1:1, 4.2:1, 4.3:1, 4.4:1, 4.5:1, 4.6:1, 4.7:1, 4.8:1, 4.9:1, 5.0:1, 5.1:1, 5.2:1, 5.3:1, 5.4:1, 5.5:1, 5.6:1, 5.7:1, 5.8:1, 5.9:1, 6.0:1, 6.1:1, 6.2:1, 6.3:1, 6.4:1, 6.5:1, 6.6:1, 6.7:1, 6.8:1, 6.9:1, 7.0:1, 7.1:1, 7.2:1, 7.3:1, 7.4:1, 7.5:1, 7.6:1, 7.7:1, 7.8:1, 7.9:1, 8.0:1, 8.1:1, 8.2:1, 8.3:1, 8.4:1, 8.5:1, 8.6:1, 8.7:1, 8.8:1, 8.9:1, 9.0:1, 9.1:1, 9.2:1, 9.3:1, 9.4:1, 9.5:1, 9.6:1, 9.7:1, 9.8:1, 9.9:1, 10.0:1, 10.1:1, 10.2:1, 10.3:1, 10.4:1, 10.5:1, 10.6:1, 10.7:1, 10.8:1, 10.9:1, 11.0:1, 11.1:1, 11.2:1, 11.3:1, 11.4:1, 11.5:1, 11.6:1, 11.7:1, 11.8:1, 11.9:1, 12.0:1, 12.1:1, 12.2:1, 12.3:1, 12.4:1, 12.5:1, 12.6:1, 12.7:1, 12.8:1, 12.9:1, 13.0:1, 13.1:1, 13.2:1, 13.3:1, 13.4:1, 13.5:1, 13.6:1, 13.7:1, 13.8:1, 13.9:1, 14.0:1, 14.1:1, 14.2:1, 14.3:1, 14.4:1, 14.5:1, 14.6:1, 14.7:1, 14.8:1, 14.9:1, 15.0:1, 15.1:1, 15.2:1, 15.3:1, 15.4:1, 15.5:1, 15.6:1, 15.7:1, 15.8:1, 15.9:1, or 16.0:1; from 3.8:1 to: 3.9:1, 4.0:1, 4.1:1, 4.2:1, 4.3:1, 4.4:1, 4.5:1, 4.6:1, 2.7:1, 4.8:1, 4.9:1, 5.0:1, 5.1:1, 5.2:1, 5.3:1, 5.4:1, 5.5:1, 5.6:1, 5.7:1, 5.8:1, 5.9:1, 6.0:1, 6.1:1, 6.2:1, 6.3:1, 6.4:1, 6.5:1, 6.6:1, 6.7:1, 6.8:1, 6.9:1, 7.0:1, 7.1:1, 7.2:1, 7.3:1, 7.4:1, 7.5:1, 7.6:1, 7.7:1, 7.8:1, 7.9:1, 8.0:1, 8.1:1, 8.2:1, 8.3:1, 8.4:1, 8.5:1, 8.6:1, 8.7:1, 8.8:1, 8.9:1, 9.0:1, 9.1:1, 9.2:1, 9.3:1, 9.4:1, 9.5:1, 9.6:1, 9.7:1, 9.8:1, 9.9:1, 10.0:1, 10.1:1, 10.2:1, 10.3:1, 10.4:1, 10.5:1, 10.6:1, 10.7:1, 10.8:1, 10.9:1, 11.0:1, 11.1:1, 11.2:1, 11.3:1, 11.4:1, 11.5:1, 11.6:1, 11.7:1, 11.8:1, 11.9:1, 12.0:1, 12.1:1, 12.2:1, 12.3:1, 12.4:1, 12.5:1, 12.6:1, 12.7:1, 12.8:1, 12.9:1, 13.0:1, 13.1:1, 13.2:1, 13.3:1, 13.4:1, 13.5:1, 13.6:1, 13.7:1, 13.8:1, 13.9:1, 14.0:1, 14.1:1, 14.2:1, 14.3:1, 14.4:1, 14.5:1, 14.6:1, 14.7:1, 14.8:1, 14.9:1, 15.0:1, 15.1:1, 15.2:1, 15.3:1, 15.4:1, 15.5:1, 15.6:1, 15.7:1, 15.8:1, 15.9:1, or 16.0:1; from 3.9:1 to: 4.0:1, 4.1:1, 4.2:1, 4.3:1, 4.4:1, 4.5:1, 4.6:1, 4.7:1, 4.8:1, 4.9:1, 5.0:1, 5.1:1, 5.2:1, 5.3:1, 5.4:1, 5.5:1, 5.6:1, 5.7:1, 5.8:1, 5.9:1, 6.0:1, 6.1:1, 6.2:1, 6.3:1, 6.4:1, 6.5:1, 6.6:1, 6.7:1, 6.8:1, 6.9:1, 7.0:1, 7.1:1, 7.2:1, 7.3:1, 7.4:1, 7.5:1, 7.6:1, 7.7:1, 7.8:1, 7.9:1, 8.0:1, 8.1:1, 8.2:1, 8.3:1, 8.4:1, 8.5:1, 8.6:1, 8.7:1, 8.8:1, 8.9:1, 9.0:1, 9.1:1, 9.2:1, 9.3:1, 9.4:1, 9.5:1, 9.6:1, 9.7:1, 9.8:1, 9.9:1, 10.0:1, 10.1:1, 10.2:1, 10.3:1, 10.4:1, 10.5:1, 10.6:1, 10.7:1, 10.8:1, 10.9:1, 11.0:1, 11.1:1, 11.2:1, 11.3:1, 11.4:1, 11.5:1, 11.6:1, 11.7:1, 11.8:1, 11.9:1, 12.0:1, 12.1:1, 12.2:1, 12.3:1, 12.4:1, 12.5:1, 12.6:1, 12.7:1, 12.8:1, 12.9:1, 13.0:1, 13.1:1, 13.2:1, 13.3:1, 13.4:1, 13.5:1, 13.6:1, 13.7:1, 13.8:1, 13.9:1, 14.0:1, 14.1:1, 14.2:1, 14.3:1, 14.4:1, 14.5:1, 14.6:1, 14.7:1, 14.8:1, 14.9:1, 15.0:1, 15.1:1, 15.2:1, 15.3:1, 15.4:1, 15.5:1, 15.6:1, 15.7:1, 15.8:1, 15.9:1, or 16.0:1; from 4.0:1 to: 4.1:1, 4.2:1, 4.3:1, 4.4:1, 4.5:1, 4.6:1, 4.7:1, 4.8:1, 4.9:1, 5.0:1, 5.1:1, 5.2:1, 5.3:1, 5.4:1, 5.5:1, 5.6:1, 5.7:1, 5.8:1, 5.9:1, 6.0:1, 6.1:1, 6.2:1, 6.3:1, 6.4:1, 6.5:1, 6.6:1, 6.7:1, 6.8:1, 6.9:1, 7.0:1, 7.1:1, 7.2:1, 7.3:1, 7.4:1, 7.5:1, 7.6:1, 7.7:1, 7.8:1, 7.9:1, 8.0:1, 8.1:1, 8.2:1, 8.3:1, 8.4:1, 8.5:1, 8.6:1, 8.7:1, 8.8:1, 8.9:1, 9.0:1, 9.1:1, 9.2:1, 9.3:1, 9.4:1, 9.5:1, 9.6:1, 9.7:1, 9.8:1, 9.9:1, 10.0:1, 10.1:1, 10.2:1, 10.3:1, 10.4:1, 10.5:1, 10.6:1, 10.7:1, 10.8:1, 10.9:1, 11.0:1, 11.1:1, 11.2:1, 11.3:1, 11.4:1, 11.5:1, 11.6:1, 11.7:1, 11.8:1, 11.9:1, 12.0:1, 12.1:1, 12.2:1, 12.3:1, 12.4:1, 12.5:1, 12.6:1, 12.7:1, 12.8:1, 12.9:1, 13.0:1, 13.1:1, 13.2:1, 13.3:1, 13.4:1, 13.5:1, 13.6:1, 13.7:1, 13.8:1, 13.9:1, 14.0:1, 14.1:1, 14.2:1, 14.3:1, 14.4:1, 14.5:1, 14.6:1, 14.7:1, 14.8:1, 14.9:1, 15.0:1, 15.1:1, 15.2:1, 15.3:1, 15.4:1, 15.5:1, 15.6:1, 15.7:1, 15.8:1, 15.9:1, or 16.0:1; from 4.1:1 to: 4.2:1, 4.3:1, 4.4:1, 4.5:1, 4.6:1, 4.7:1, 4.8:1, 4.9:1, 5.0:1, 5.1:1, 5.2:1, 5.3:1, 5.4:1, 5.5:1, 5.6:1, 5.7:1, 5.8:1, 5.9:1, 6.0:1, 6.1:1, 6.2:1, 6.3:1, 6.4:1, 6.5:1, 6.6:1, 6.7:1, 6.8:1, 6.9:1, 7.0:1, 7.1:1, 7.2:1, 7.3:1, 7.4:1, 7.5:1, 7.6:1, 7.7:1, 7.8:1, 7.9:1, 8.0:1, 8.1:1, 8.2:1, 8.3:1, 8.4:1, 8.5:1, 8.6:1, 8.7:1, 8.8:1, 8.9:1, 9.0:1, 9.1:1, 9.2:1, 9.3:1, 9.4:1, 9.5:1, 9.6:1, 9.7:1, 9.8:1, 9.9:1, 10.0:1, 10.1:1, 10.2:1, 10.3:1, 10.4:1, 10.5:1, 10.6:1, 10.7:1, 10.8:1, 10.9:1, 11.0:1, 11.1:1, 11.2:1, 11.3:1, 11.4:1, 11.5:1, 11.6:1, 11.7:1, 11.8:1, 11.9:1, 12.0:1, 12.1:1, 12.2:1, 12.3:1, 12.4:1, 12.5:1, 12.6:1, 12.7:1, 12.8:1, 12.9:1, 13.0:1, 13.1:1, 13.2:1, 13.3:1, 13.4:1, 13.5:1, 13.6:1, 13.7:1, 13.8:1, 13.9:1, 14.0:1, 14.1:1, 14.2:1, 14.3:1, 14.4:1, 14.5:1, 14.6:1, 14.7:1, 14.8:1, 14.9:1, 15.0:1, 15.1:1, 15.2:1, 15.3:1, 15.4:1, 15.5:1, 15.6:1, 15.7:1, 15.8:1, 15.9:1, or 16.0:1; from 4.2:1 to: 4.3:1, 4.4:1, 4.5:1, 4.6:1, 4.7:1, 4.8:1, 4.9:1, 5.0:1, 5.1:1, 5.2:1, 5.3:1, 5.4:1, 5.5:1, 5.6:1, 5.7:1, 5.8:1, 5.9:1, 6.0:1, 6.1:1, 6.2:1, 6.3:1, 6.4:1, 6.5:1, 6.6:1, 6.7:1, 6.8:1, 6.9:1, 7.0:1, 7.1:1, 7.2:1, 7.3:1, 7.4:1, 7.5:1, 7.6:1, 7.7:1, 7.8:1, 7.9:1, 8.0:1, 8.1:1, 8.2:1, 8.3:1, 8.4:1, 8.5:1, 8.6:1, 8.7:1, 8.8:1, 8.9:1, 9.0:1, 9.1:1, 9.2:1, 9.3:1, 9.4:1, 9.5:1, 9.6:1, 9.7:1, 9.8:1, 9.9:1, 10.0:1, 10.1:1, 10.2:1, 10.3:1, 10.4:1, 10.5:1, 10.6:1, 10.7:1, 10.8:1, 10.9:1, 11.0:1, 11.1:1, 11.2:1, 11.3:1, 11.4:1, 11.5:1, 11.6:1, 11.7:1, 11.8:1, 11.9:1, 12.0:1, 12.1:1, 12.2:1, 12.3:1, 12.4:1, 12.5:1, 12.6:1, 12.7:1, 12.8:1, 12.9:1, 13.0:1, 13.1:1, 13.2:1, 13.3:1, 13.4:1, 13.5:1, 13.6:1, 13.7:1, 13.8:1, 13.9:1, 14.0:1, 14.1:1, 14.2:1, 14.3:1, 14.4:1, 14.5:1, 14.6:1, 14.7:1, 14.8:1, 14.9:1, 15.0:1, 15.1:1, 15.2:1, 15.3:1, 15.4:1, 15.5:1, 15.6:1, 15.7:1, 15.8:1, 15.9:1, or 16.0:1; from 4.3:1 to: 4.4:1, 4.5:1, 4.6:1, 4.7:1, 4.8:1, 4.9:1, 5.0:1, 5.1:1, 5.2:1, 5.3:1, 5.4:1, 5.5:1, 5.6:1, 5.7:1, 5.8:1, 5.9:1, 6.0:1, 6.1:1, 6.2:1, 6.3:1, 6.4:1, 6.5:1, 6.6:1, 6.7:1, 6.8:1, 6.9:1, 7.0:1, 7.1:1, 7.2:1, 7.3:1, 7.4:1, 7.5:1, 7.6:1, 7.7:1, 7.8:1, 7.9:1, 8.0:1, 8.1:1, 8.2:1, 8.3:1, 8.4:1, 8.5:1, 8.6:1, 8.7:1, 8.8:1, 8.9:1, 9.0:1, 9.1:1, 9.2:1, 9.3:1, 9.4:1, 9.5:1, 9.6:1, 9.7:1, 9.8:1, 9.9:1, 10.0:1, 10.1:1, 10.2:1, 10.3:1, 10.4:1, 10.5:1, 10.6:1, 10.7:1, 10.8:1, 10.9:1, 11.0:1, 11.1:1, 11.2:1, 11.3:1, 11.4:1, 11.5:1, 11.6:1, 11.7:1, 11.8:1, 11.9:1, 12.0:1, 12.1:1, 12.2:1, 12.3:1, 12.4:1, 12.5:1, 12.6:1, 12.7:1, 12.8:1, 12.9:1, 13.0:1, 13.1:1, 13.2:1, 13.3:1, 13.4:1, 13.5:1, 13.6:1, 13.7:1, 13.8:1, 13.9:1, 14.0:1, 14.1:1, 14.2:1, 14.3:1, 14.4:1, 14.5:1, 14.6:1, 14.7:1, 14.8:1, 14.9:1, 15.0:1, 15.1:1, 15.2:1, 15.3:1, 15.4:1, 15.5:1, 15.6:1, 15.7:1, 15.8:1, 15.9:1, or 16.0:1; from 4.4:1 to: 4.5:1, 4.6:1, 4.7:1, 4.8:1, 4.9:1, 5.0:1, 5.1:1, 5.2:1, 5.3:1, 5.4:1, 5.5:1, 5.6:1, 5.7:1, 5.8:1, 5.9:1, 6.0:1, 6.1:1, 6.2:1, 6.3:1, 6.4:1, 6.5:1, 6.6:1, 6.7:1, 6.8:1, 6.9:1, 7.0:1, 7.1:1, 7.2:1, 7.3:1, 7.4:1, 7.5:1, 7.6:1, 7.7:1, 7.8:1, 7.9:1, 8.0:1, 8.1:1, 8.2:1, 8.3:1, 8.4:1, 8.5:1, 8.6:1, 8.7:1, 8.8:1, 8.9:1, 9.0:1, 9.1:1, 9.2:1, 9.3:1, 9.4:1, 9.5:1, 9.6:1, 9.7:1, 9.8:1, 9.9:1, 10.0:1, 10.1:1, 10.2:1, 10.3:1, 10.4:1, 10.5:1, 10.6:1, 10.7:1, 10.8:1, 10.9:1, 11.0:1, 11.1:1, 11.2:1, 11.3:1, 11.4:1, 11.5:1, 11.6:1, 11.7:1, 11.8:1, 11.9:1, 12.0:1, 12.1:1, 12.2:1, 12.3:1, 12.4:1, 12.5:1, 12.6:1, 12.7:1, 12.8:1, 12.9:1, 13.0:1, 13.1:1, 13.2:1, 13.3:1, 13.4:1, 13.5:1, 13.6:1, 13.7:1, 13.8:1, 13.9:1, 14.0:1, 14.1:1, 14.2:1, 14.3:1, 14.4:1, 14.5:1, 14.6:1, 14.7:1, 14.8:1, 14.9:1, 15.0:1, 15.1:1, 15.2:1, 15.3:1, 15.4:1, 15.5:1, 15.6:1, 15.7:1, 15.8:1, 15.9:1, or 16.0:1; from 4.5:1 to: 4.6:1, 4.7:1, 4.8:1, 4.9:1, 5.0:1, 5.1:1, 5.2:1, 5.3:1, 5.4:1, 5.5:1, 5.6:1, 5.7:1, 5.8:1, 5.9:1, 6.0:1, 6.1:1, 6.2:1, 6.3:1, 6.4:1, 6.5:1, 6.6:1, 6.7:1, 6.8:1, 6.9:1, 7.0:1, 7.1:1, 7.2:1, 7.3:1, 7.4:1, 7.5:1, 7.6:1, 7.7:1, 7.8:1, 7.9:1, 8.0:1, 8.1:1, 8.2:1, 8.3:1, 8.4:1, 8.5:1, 8.6:1, 8.7:1, 8.8:1, 8.9:1, 9.0:1, 9.1:1, 9.2:1, 9.3:1, 9.4:1, 9.5:1, 9.6:1, 9.7:1, 9.8:1, 9.9:1, 10.0:1, 10.1:1, 10.2:1, 10.3:1, 10.4:1, 10.5:1, 10.6:1, 10.7:1, 10.8:1, 10.9:1, 11.0:1, 11.1:1, 11.2:1, 11.3:1, 11.4:1, 11.5:1, 11.6:1, 11.7:1, 11.8:1, 11.9:1, 12.0:1, 12.1:1, 12.2:1, 12.3:1, 12.4:1, 12.5:1, 12.6:1, 12.7:1, 12.8:1, 12.9:1, 13.0:1, 13.1:1, 13.2:1, 13.3:1, 13.4:1, 13.5:1, 13.6:1, 13.7:1, 13.8:1, 13.9:1, 14.0:1, 14.1:1, 14.2:1, 14.3:1, 14.4:1, 14.5:1, 14.6:1, 14.7:1, 14.8:1, 14.9:1, 15.0:1, 15.1:1, 15.2:1, 15.3:1, 15.4:1, 15.5:1, 15.6:1, 15.7:1, 15.8:1, 15.9:1, or 16.0:1; from 4.6:1 to: 4.7:1, 4.8:1, 4.9:1, 5.0:1, 5.1:1, 5.2:1, 5.3:1, 5.4:1, 5.5:1, 5.6:1, 5.7:1, 5.8:1, 5.9:1, 6.0:1, 6.1:1, 6.2:1, 6.3:1, 6.4:1, 6.5:1, 6.6:1, 6.7:1, 6.8:1, 6.9:1, 7.0:1, 7.1:1, 7.2:1, 7.3:1, 7.4:1, 7.5:1, 7.6:1, 7.7:1, 7.8:1, 7.9:1, 8.0:1, 8.1:1, 8.2:1, 8.3:1, 8.4:1, 8.5:1, 8.6:1, 8.7:1, 8.8:1, 8.9:1, 9.0:1, 9.1:1, 9.2:1, 9.3:1, 9.4:1, 9.5:1, 9.6:1, 9.7:1, 9.8:1, 9.9:1, 10.0:1, 10.1:1, 10.2:1, 10.3:1, 10.4:1, 10.5:1, 10.6:1, 10.7:1, 10.8:1, 10.9:1, 11.0:1, 11.1:1, 11.2:1, 11.3:1, 11.4:1, 11.5:1, 11.6:1, 11.7:1, 11.8:1, 11.9:1, 12.0:1, 12.1:1, 12.2:1, 12.3:1, 12.4:1, 12.5:1, 12.6:1, 12.7:1, 12.8:1, 12.9:1, 13.0:1, 13.1:1, 13.2:1, 13.3:1, 13.4:1, 13.5:1, 13.6:1, 13.7:1, 13.8:1, 13.9:1, 14.0:1, 14.1:1, 14.2:1, 14.3:1, 14.4:1, 14.5:1, 14.6:1, 14.7:1, 14.8:1, 14.9:1, 15.0:1, 15.1:1, 15.2:1, 15.3:1, 15.4:1, 15.5:1, 15.6:1, 15.7:1, 15.8:1, 15.9:1, or 16.0:1; from 4.7:1 to: 4.8:1, 4.9:1, 5.0:1, 5.1:1, 5.2:1, 5.3:1, 5.4:1, 5.5:1, 5.6:1, 5.7:1, 5.8:1, 5.9:1, 6.0:1, 6.1:1, 6.2:1, 6.3:1, 6.4:1, 6.5:1, 6.6:1, 6.7:1, 6.8:1, 6.9:1, 7.0:1, 7.1:1, 7.2:1, 7.3:1, 7.4:1, 7.5:1, 7.6:1, 7.7:1, 7.8:1, 7.9:1, 8.0:1, 8.1:1, 8.2:1, 8.3:1, 8.4:1, 8.5:1, 8.6:1, 8.7:1, 8.8:1, 8.9:1, 9.0:1, 9.1:1, 9.2:1, 9.3:1, 9.4:1, 9.5:1, 9.6:1, 9.7:1, 9.8:1, 9.9:1, 10.0:1, 10.1:1, 10.2:1, 10.3:1, 10.4:1, 10.5:1, 10.6:1, 10.7:1, 10.8:1, 10.9:1, 11.0:1, 11.1:1, 11.2:1, 11.3:1, 11.4:1, 11.5:1, 11.6:1, 11.7:1, 11.8:1, 11.9:1, 12.0:1, 12.1:1, 12.2:1, 12.3:1, 12.4:1, 12.5:1, 12.6:1, 12.7:1, 12.8:1, 12.9:1, 13.0:1, 13.1:1, 13.2:1, 13.3:1, 13.4:1, 13.5:1, 13.6:1, 13.7:1, 13.8:1, 13.9:1, 14.0:1, 14.1:1, 14.2:1, 14.3:1, 14.4:1, 14.5:1, 14.6:1, 14.7:1, 14.8:1, 14.9:1, 15.0:1, 15.1:1, 15.2:1, 15.3:1, 15.4:1, 15.5:1, 15.6:1, 15.7:1, 15.8:1, 15.9:1, or 16.0:1; from 4.8:1 to: 4.9:1, 5.0:1, 5.1:1, 5.2:1, 5.3:1, 5.4:1, 5.5:1, 5.6:1, 5.7:1, 5.8:1, 5.9:1, 6.0:1, 6.1:1, 6.2:1, 6.3:1, 6.4:1, 6.5:1, 6.6:1, 6.7:1, 6.8:1, 6.9:1, 7.0:1, 7.1:1, 7.2:1, 7.3:1, 7.4:1, 7.5:1, 7.6:1, 7.7:1, 7.8:1, 7.9:1, 8.0:1, 8.1:1, 8.2:1, 8.3:1, 8.4:1, 8.5:1, 8.6:1, 8.7:1, 8.8:1, 8.9:1, 9.0:1, 9.1:1, 9.2:1, 9.3:1, 9.4:1, 9.5:1, 9.6:1, 9.7:1, 9.8:1, 9.9:1, 10.0:1, 10.1:1, 10.2:1, 10.3:1, 10.4:1, 10.5:1, 10.6:1, 10.7:1, 10.8:1, 10.9:1, 11.0:1, 11.1:1, 11.2:1, 11.3:1, 11.4:1, 11.5:1, 11.6:1, 11.7:1, 11.8:1, 11.9:1, 12.0:1, 12.1:1, 12.2:1, 12.3:1, 12.4:1, 12.5:1, 12.6:1, 12.7:1, 12.8:1, 12.9:1, 13.0:1, 13.1:1, 13.2:1, 13.3:1, 13.4:1, 13.5:1, 13.6:1, 13.7:1, 13.8:1, 13.9:1, 14.0:1, 14.1:1, 14.2:1, 14.3:1, 14.4:1, 14.5:1, 14.6:1, 14.7:1, 14.8:1, 14.9:1, 15.0:1, 15.1:1, 15.2:1, 15.3:1, 15.4:1, 15.5:1, 15.6:1, 15.7:1, 15.8:1, 15.9:1, or 16.0:1; from 4.9:1 to: 5.0:1, 5.1:1, 5.2:1, 5.3:1, 5.4:1, 5.5:1, 5.6:1, 5.7:1, 5.8:1, 5.9:1, 6.0:1, 6.1:1, 6.2:1, 6.3:1, 6.4:1, 6.5:1, 6.6:1, 6.7:1, 6.8:1, 6.9:1, 7.0:1, 7.1:1, 7.2:1, 7.3:1, 7.4:1, 7.5:1, 7.6:1, 7.7:1, 7.8:1, 7.9:1, 8.0:1, 8.1:1, 8.2:1, 8.3:1, 8.4:1, 8.5:1, 8.6:1, 8.7:1, 8.8:1, 8.9:1, 9.0:1, 9.1:1, 9.2:1, 9.3:1, 9.4:1, 9.5:1, 9.6:1, 9.7:1, 9.8:1, 9.9:1, 10.0:1, 10.1:1, 10.2:1, 10.3:1, 10.4:1, 10.5:1, 10.6:1, 10.7:1, 10.8:1, 10.9:1, 11.0:1, 11.1:1, 11.2:1, 11.3:1, 11.4:1, 11.5:1, 11.6:1, 11.7:1, 11.8:1, 11.9:1, 12.0:1, 12.1:1, 12.2:1, 12.3:1, 12.4:1, 12.5:1, 12.6:1, 12.7:1, 12.8:1, 12.9:1, 13.0:1, 13.1:1, 13.2:1, 13.3:1, 13.4:1, 13.5:1, 13.6:1, 13.7:1, 13.8:1, 13.9:1, 14.0:1, 14.1:1, 14.2:1, 14.3:1, 14.4:1, 14.5:1, 14.6:1, 14.7:1, 14.8:1, 14.9:1, 15.0:1, 15.1:1, 15.2:1, 15.3:1, 15.4:1, 15.5:1, 15.6:1, 15.7:1, 15.8:1, 15.9:1, or 16.0:1; from 5.0:1 to: 5.1:1, 5.2:1, 5.3:1, 5.4:1, 5.5:1, 5.6:1, 5.7:1, 5.8:1, 5.9:1, 6.0:1, 6.1:1, 6.2:1, 6.3:1, 6.4:1, 6.5:1, 6.6:1, 6.7:1, 6.8:1, 6.9:1, 7.0:1, 7.1:1, 7.2:1, 7.3:1, 7.4:1, 7.5:1, 7.6:1, 7.7:1, 7.8:1, 7.9:1, 8.0:1, 8.1:1, 8.2:1, 8.3:1, 8.4:1, 8.5:1, 8.6:1, 8.7:1, 8.8:1, 8.9:1, 9.0:1, 9.1:1, 9.2:1, 9.3:1, 9.4:1, 9.5:1, 9.6:1, 9.7:1, 9.8:1, 9.9:1, 10.0:1, 10.1:1, 10.2:1, 10.3:1, 10.4:1, 10.5:1, 10.6:1, 10.7:1, 10.8:1, 10.9:1, 11.0:1, 11.1:1, 11.2:1, 11.3:1, 11.4:1, 11.5:1, 11.6:1, 11.7:1, 11.8:1, 11.9:1, 12.0:1, 12.1:1, 12.2:1, 12.3:1, 12.4:1, 12.5:1, 12.6:1, 12.7:1, 12.8:1, 12.9:1, 13.0:1, 13.1:1, 13.2:1, 13.3:1, 13.4:1, 13.5:1, 13.6:1, 13.7:1, 13.8:1, 13.9:1, 14.0:1, 14.1:1, 14.2:1, 14.3:1, 14.4:1, 14.5:1, 14.6:1, 14.7:1, 14.8:1, 14.9:1, 15.0:1, 15.1:1, 15.2:1, 15.3:1, 15.4:1, 15.5:1, 15.6:1, 15.7:1, 15.8:1, 15.9:1, or 16.0:1; from 5.1:1 to: 5.2:1, 5.3:1, 5.4:1, 5.5:1, 5.6:1, 5.7:1, 5.8:1, 5.9:1, 6.0:1, 6.1:1, 6.2:1, 6.3:1, 6.4:1, 6.5:1, 6.6:1, 6.7:1, 6.8:1, 6.9:1, 7.0:1, 7.1:1, 7.2:1, 7.3:1, 7.4:1, 7.5:1, 7.6:1, 7.7:1, 7.8:1, 7.9:1, 8.0:1, 8.1:1, 8.2:1, 8.3:1, 8.4:1, 8.5:1, 8.6:1, 8.7:1, 8.8:1, 8.9:1, 9.0:1, 9.1:1, 9.2:1, 9.3:1, 9.4:1, 9.5:1, 9.6:1, 9.7:1, 9.8:1, 9.9:1, 10.0:1, 10.1:1, 10.2:1, 10.3:1, 10.4:1, 10.5:1, 10.6:1, 10.7:1, 10.8:1, 10.9:1, 11.0:1, 11.1:1, 11.2:1, 11.3:1, 11.4:1, 11.5:1, 11.6:1, 11.7:1, 11.8:1, 11.9:1, 12.0:1, 12.1:1, 12.2:1, 12.3:1, 12.4:1, 12.5:1, 12.6:1, 12.7:1, 12.8:1, 12.9:1, 13.0:1, 13.1:1, 13.2:1, 13.3:1, 13.4:1, 13.5:1, 13.6:1, 13.7:1, 13.8:1, 13.9:1, 14.0:1, 14.1:1, 14.2:1, 14.3:1, 14.4:1, 14.5:1, 14.6:1, 14.7:1, 14.8:1, 14.9:1, 15.0:1, 15.1:1, 15.2:1, 15.3:1, 15.4:1, 15.5:1, 15.6:1, 15.7:1, 15.8:1, 15.9:1, or 16.0:1; from 5.2:1 to: 5.3:1, 5.4:1, 5.5:1, 5.6:1, 5.7:1, 5.8:1, 5.9:1, 6.0:1, 6.1:1, 6.2:1, 6.3:1, 6.4:1, 6.5:1, 6.6:1, 6.7:1, 6.8:1, 6.9:1, 7.0:1, 7.1:1, 7.2:1, 7.3:1, 7.4:1, 7.5:1, 7.6:1, 7.7:1, 7.8:1, 7.9:1, 8.0:1, 8.1:1, 8.2:1, 8.3:1, 8.4:1, 8.5:1, 8.6:1, 8.7:1, 8.8:1, 8.9:1, 9.0:1, 9.1:1, 9.2:1, 9.3:1, 9.4:1, 9.5:1, 9.6:1, 9.7:1, 9.8:1, 9.9:1, 10.0:1, 10.1:1, 10.2:1, 10.3:1, 10.4:1, 10.5:1, 10.6:1, 10.7:1, 10.8:1, 10.9:1, 11.0:1, 11.1:1, 11.2:1, 11.3:1, 11.4:1, 11.5:1, 11.6:1, 11.7:1, 11.8:1, 11.9:1, 12.0:1, 12.1:1, 12.2:1, 12.3:1, 12.4:1, 12.5:1, 12.6:1, 12.7:1, 12.8:1, 12.9:1, 13.0:1, 13.1:1, 13.2:1, 13.3:1, 13.4:1, 13.5:1, 13.6:1, 13.7:1, 13.8:1, 13.9:1, 14.0:1, 14.1:1, 14.2:1, 14.3:1, 14.4:1, 14.5:1, 14.6:1, 14.7:1, 14.8:1, 14.9:1, 15.0:1, 15.1:1, 15.2:1, 15.3:1, 15.4:1, 15.5:1, 15.6:1, 15.7:1, 15.8:1, 15.9:1, or 16.0:1; from 5.3:1 to: 5.4:1, 5.5:1, 5.6:1, 5.7:1, 5.8:1, 5.9:1, 6.0:1, 6.1:1, 6.2:1, 6.3:1, 6.4:1, 6.5:1, 6.6:1, 6.7:1, 6.8:1, 6.9:1, 7.0:1, 7.1:1, 7.2:1, 7.3:1, 7.4:1, 7.5:1, 7.6:1, 7.7:1, 7.8:1, 7.9:1, 8.0:1, 8.1:1, 8.2:1, 8.3:1, 8.4:1, 8.5:1, 8.6:1, 8.7:1, 8.8:1, 8.9:1, 9.0:1, 9.1:1, 9.2:1, 9.3:1, 9.4:1, 9.5:1, 9.6:1, 9.7:1, 9.8:1, 9.9:1, 10.0:1, 10.1:1, 10.2:1, 10.3:1, 10.4:1, 10.5:1, 10.6:1, 10.7:1, 10.8:1, 10.9:1, 11.0:1, 11.1:1, 11.2:1, 11.3:1, 11.4:1, 11.5:1, 11.6:1, 11.7:1, 11.8:1, 11.9:1, 12.0:1, 12.1:1, 12.2:1, 12.3:1, 12.4:1, 12.5:1, 12.6:1, 12.7:1, 12.8:1, 12.9:1, 13.0:1, 13.1:1, 13.2:1, 13.3:1, 13.4:1, 13.5:1, 13.6:1, 13.7:1, 13.8:1, 13.9:1, 14.0:1, 14.1:1, 14.2:1, 14.3:1, 14.4:1, 14.5:1, 14.6:1, 14.7:1, 14.8:1, 14.9:1, 15.0:1, 15.1:1, 15.2:1, 15.3:1, 15.4:1, 15.5:1, 15.6:1, 15.7:1, 15.8:1, 15.9:1, or 16.0:1; from 5.4:1 to: 5.5:1, 5.6:1, 5.7:1, 5.8:1, 5.9:1, 6.0:1, 6.1:1, 6.2:1, 6.3:1, 6.4:1, 6.5:1, 6.6:1, 6.7:1, 6.8:1, 6.9:1, 7.0:1, 7.1:1, 7.2:1, 7.3:1, 7.4:1, 7.5:1, 7.6:1, 7.7:1, 7.8:1, 7.9:1, 8.0:1, 8.1:1, 8.2:1, 8.3:1, 8.4:1, 8.5:1, 8.6:1, 8.7:1, 8.8:1, 8.9:1, 9.0:1, 9.1:1, 9.2:1, 9.3:1, 9.4:1, 9.5:1, 9.6:1, 9.7:1, 9.8:1, 9.9:1, 10.0:1, 10.1:1, 10.2:1, 10.3:1, 10.4:1, 10.5:1, 10.6:1, 10.7:1, 10.8:1, 10.9:1, 11.0:1, 11.1:1, 11.2:1, 11.3:1, 11.4:1, 11.5:1, 11.6:1, 11.7:1, 11.8:1, 11.9:1, 12.0:1, 12.1:1, 12.2:1, 12.3:1, 12.4:1, 12.5:1, 12.6:1, 12.7:1, 12.8:1, 12.9:1, 13.0:1, 13.1:1, 13.2:1, 13.3:1, 13.4:1, 13.5:1, 13.6:1, 13.7:1, 13.8:1, 13.9:1, 14.0:1, 14.1:1, 14.2:1, 14.3:1, 14.4:1, 14.5:1, 14.6:1, 14.7:1, 14.8:1, 14.9:1, 15.0:1, 15.1:1, 15.2:1, 15.3:1, 15.4:1, 15.5:1, 15.6:1, 15.7:1, 15.8:1, 15.9:1, or 16.0:1; from 5.5:1 to: 5.6:1, 5.7:1, 5.8:1, 5.9:1, 6.0:1, 6.1:1, 6.2:1, 6.3:1, 6.4:1, 6.5:1, 6.6:1, 6.7:1, 6.8:1, 6.9:1, 7.0:1, 7.1:1, 7.2:1, 7.3:1, 7.4:1, 7.5:1, 7.6:1, 7.7:1, 7.8:1, 7.9:1, 8.0:1, 8.1:1, 8.2:1, 8.3:1, 8.4:1, 8.5:1, 8.6:1, 8.7:1, 8.8:1, 8.9:1, 9.0:1, 9.1:1, 9.2:1, 9.3:1, 9.4:1, 9.5:1, 9.6:1, 9.7:1, 9.8:1, 9.9:1, 10.0:1, 10.1:1, 10.2:1, 10.3:1, 10.4:1, 10.5:1, 10.6:1, 10.7:1, 10.8:1, 10.9:1, 11.0:1, 11.1:1, 11.2:1, 11.3:1, 11.4:1, 11.5:1, 11.6:1, 11.7:1, 11.8:1, 11.9:1, 12.0:1, 12.1:1, 12.2:1, 12.3:1, 12.4:1, 12.5:1, 12.6:1, 12.7:1, 12.8:1, 12.9:1, 13.0:1, 13.1:1, 13.2:1, 13.3:1, 13.4:1, 13.5:1, 13.6:1, 13.7:1, 13.8:1, 13.9:1, 14.0:1, 14.1:1, 14.2:1, 14.3:1, 14.4:1, 14.5:1, 14.6:1, 14.7:1, 14.8:1, 14.9:1, 15.0:1, 15.1:1, 15.2:1, 15.3:1, 15.4:1, 15.5:1, 15.6:1, 15.7:1, 15.8:1, 15.9:1, or 16.0:1; from 5.6:1 to: 5.7:1, 5.8:1, 5.9:1, 6.0:1, 6.1:1, 6.2:1, 6.3:1, 6.4:1, 6.5:1, 6.6:1, 6.7:1, 6.8:1, 6.9:1, 7.0:1, 7.1:1, 7.2:1, 7.3:1, 7.4:1, 7.5:1, 7.6:1, 7.7:1, 7.8:1, 7.9:1, 8.0:1, 8.1:1, 8.2:1, 8.3:1, 8.4:1, 8.5:1, 8.6:1, 8.7:1, 8.8:1, 8.9:1, 9.0:1, 9.1:1, 9.2:1, 9.3:1, 9.4:1, 9.5:1, 9.6:1, 9.7:1, 9.8:1, 9.9:1, 10.0:1, 10.1:1, 10.2:1, 10.3:1, 10.4:1, 10.5:1, 10.6:1, 10.7:1, 10.8:1, 10.9:1, 11.0:1, 11.1:1, 11.2:1, 11.3:1, 11.4:1, 11.5:1, 11.6:1, 11.7:1, 11.8:1, 11.9:1, 12.0:1, 12.1:1, 12.2:1, 12.3:1, 12.4:1, 12.5:1, 12.6:1, 12.7:1, 12.8:1, 12.9:1, 13.0:1, 13.1:1, 13.2:1, 13.3:1, 13.4:1, 13.5:1, 13.6:1, 13.7:1, 13.8:1, 13.9:1, 14.0:1, 14.1:1, 14.2:1, 14.3:1, 14.4:1, 14.5:1, 14.6:1, 14.7:1, 14.8:1, 14.9:1, 15.0:1, 15.1:1, 15.2:1, 15.3:1, 15.4:1, 15.5:1, 15.6:1, 15.7:1, 15.8:1, 15.9:1, or 16.0:1; from 5.7:1 to: 5.8:1, 5.9:1, 6.0:1, 6.1:1, 6.2:1, 6.3:1, 6.4:1, 6.5:1, 6.6:1, 6.7:1, 6.8:1, 6.9:1, 7.0:1, 7.1:1, 7.2:1, 7.3:1, 7.4:1, 7.5:1, 7.6:1, 7.7:1, 7.8:1, 7.9:1, 8.0:1, 8.1:1, 8.2:1, 8.3:1, 8.4:1, 8.5:1, 8.6:1, 8.7:1, 8.8:1, 8.9:1, 9.0:1, 9.1:1, 9.2:1, 9.3:1, 9.4:1, 9.5:1, 9.6:1, 9.7:1, 9.8:1, 9.9:1, 10.0:1, 10.1:1, 10.2:1, 10.3:1, 10.4:1, 10.5:1, 10.6:1, 10.7:1, 10.8:1, 10.9:1, 11.0:1, 11.1:1, 11.2:1, 11.3:1, 11.4:1, 11.5:1, 11.6:1, 11.7:1, 11.8:1, 11.9:1, 12.0:1, 12.1:1, 12.2:1, 12.3:1, 12.4:1, 12.5:1, 12.6:1, 12.7:1, 12.8:1, 12.9:1, 13.0:1, 13.1:1, 13.2:1, 13.3:1, 13.4:1, 13.5:1, 13.6:1, 13.7:1, 13.8:1, 13.9:1, 14.0:1, 14.1:1, 14.2:1, 14.3:1, 14.4:1, 14.5:1, 14.6:1, 14.7:1, 14.8:1, 14.9:1, 15.0:1, 15.1:1, 15.2:1, 15.3:1, 15.4:1, 15.5:1, 15.6:1, 15.7:1, 15.8:1, 15.9:1, or 16.0:1; from 5.8:1 to: 5.9:1, 6.0:1, 6.1:1, 6.2:1, 6.3:1, 6.4:1, 6.5:1, 6.6:1, 6.7:1, 6.8:1, 6.9:1, 7.0:1, 7.1:1, 7.2:1, 7.3:1, 7.4:1, 7.5:1, 7.6:1, 7.7:1, 7.8:1, 7.9:1, 8.0:1, 8.1:1, 8.2:1, 8.3:1, 8.4:1, 8.5:1, 8.6:1, 8.7:1, 8.8:1, 8.9:1, 9.0:1, 9.1:1, 9.2:1, 9.3:1, 9.4:1, 9.5:1, 9.6:1, 9.7:1, 9.8:1, 9.9:1, 10.0:1, 10.1:1, 10.2:1, 10.3:1, 10.4:1, 10.5:1, 10.6:1, 10.7:1, 10.8:1, 10.9:1, 11.0:1, 11.1:1, 11.2:1, 11.3:1, 11.4:1, 11.5:1, 11.6:1, 11.7:1, 11.8:1, 11.9:1, 12.0:1, 12.1:1, 12.2:1, 12.3:1, 12.4:1, 12.5:1, 12.6:1, 12.7:1, 12.8:1, 12.9:1, 13.0:1, 13.1:1, 13.2:1, 13.3:1, 13.4:1, 13.5:1, 13.6:1, 13.7:1, 13.8:1, 13.9:1, 14.0:1, 14.1:1, 14.2:1, 14.3:1, 14.4:1, 14.5:1, 14.6:1, 14.7:1, 14.8:1, 14.9:1, 15.0:1, 15.1:1, 15.2:1, 15.3:1, 15.4:1, 15.5:1, 15.6:1, 15.7:1, 15.8:1, 15.9:1, or 16.0:1; from 5.9:1 to: 6.0:1, 6.1:1, 6.2:1, 6.3:1, 6.4:1, 6.5:1, 6.6:1, 6.7:1, 6.8:1, 6.9:1, 7.0:1, 7.1:1, 7.2:1, 7.3:1, 7.4:1, 7.5:1, 7.6:1, 7.7:1, 7.8:1, 7.9:1, 8.0:1, 8.1:1, 8.2:1, 8.3:1, 8.4:1, 8.5:1, 8.6:1, 8.7:1, 8.8:1, 8.9:1, 9.0:1, 9.1:1, 9.2:1, 9.3:1, 9.4:1, 9.5:1, 9.6:1, 9.7:1, 9.8:1, 9.9:1, 10.0:1, 10.1:1, 10.2:1, 10.3:1, 10.4:1, 10.5:1, 10.6:1, 10.7:1, 10.8:1, 10.9:1, 11.0:1, 11.1:1, 11.2:1, 11.3:1, 11.4:1, 11.5:1, 11.6:1, 11.7:1, 11.8:1, 11.9:1, 12.0:1, 12.1:1, 12.2:1, 12.3:1, 12.4:1, 12.5:1, 12.6:1, 12.7:1, 12.8:1, 12.9:1, 13.0:1, 13.1:1, 13.2:1, 13.3:1, 13.4:1, 13.5:1, 13.6:1, 13.7:1, 13.8:1, 13.9:1, 14.0:1, 14.1:1, 14.2:1, 14.3:1, 14.4:1, 14.5:1, 14.6:1, 14.7:1, 14.8:1, 14.9:1, 15.0:1, 15.1:1, 15.2:1, 15.3:1, 15.4:1, 15.5:1, 15.6:1, 15.7:1, 15.8:1, 15.9:1, or 16.0:1; from 6.0:1 to: 6.1:1, 6.2:1, 6.3:1, 6.4:1, 6.5:1, 6.6:1, 6.7:1, 6.8:1, 6.9:1, 7.0:1, 7.1:1, 7.2:1, 7.3:1, 7.4:1, 7.5:1, 7.6:1, 7.7:1, 7.8:1, 7.9:1, 8.0:1, 8.1:1, 8.2:1, 8.3:1, 8.4:1, 8.5:1, 8.6:1, 8.7:1, 8.8:1, 8.9:1, 9.0:1, 9.1:1, 9.2:1, 9.3:1, 9.4:1, 9.5:1, 9.6:1, 9.7:1, 9.8:1, 9.9:1, 10.0:1, 10.1:1, 10.2:1, 10.3:1, 10.4:1, 10.5:1, 10.6:1, 10.7:1, 10.8:1, 10.9:1, 11.0:1, 11.1:1, 11.2:1, 11.3:1, 11.4:1, 11.5:1, 11.6:1, 11.7:1, 11.8:1, 11.9:1, 12.0:1, 12.1:1, 12.2:1, 12.3:1, 12.4:1, 12.5:1, 12.6:1, 12.7:1, 12.8:1, 12.9:1, 13.0:1, 13.1:1, 13.2:1, 13.3:1, 13.4:1, 13.5:1, 13.6:1, 13.7:1, 13.8:1, 13.9:1, 14.0:1, 14.1:1, 14.2:1, 14.3:1, 14.4:1, 14.5:1, 14.6:1, 14.7:1, 14.8:1, 14.9:1, 15.0:1, 15.1:1, 15.2:1, 15.3:1, 15.4:1, 15.5:1, 15.6:1, 15.7:1, 15.8:1, 15.9:1, or 16.0:1; from 6.1:1 to: 6.2:1, 6.3:1, 6.4:1, 6.5:1, 6.6:1, 6.7:1, 6.8:1, 6.9:1, 7.0:1, 7.1:1, 7.2:1, 7.3:1, 7.4:1, 7.5:1, 7.6:1, 7.7:1, 7.8:1, 7.9:1, 8.0:1, 8.1:1, 8.2:1, 8.3:1, 8.4:1, 8.5:1, 8.6:1, 8.7:1, 8.8:1, 8.9:1, 9.0:1, 9.1:1, 9.2:1, 9.3:1, 9.4:1, 9.5:1, 9.6:1, 9.7:1, 9.8:1, 9.9:1, 10.0:1, 10.1:1, 10.2:1, 10.3:1, 10.4:1, 10.5:1, 10.6:1, 10.7:1, 10.8:1, 10.9:1, 11.0:1, 11.1:1, 11.2:1, 11.3:1, 11.4:1, 11.5:1, 11.6:1, 11.7:1, 11.8:1, 11.9:1, 12.0:1, 12.1:1, 12.2:1, 12.3:1, 12.4:1, 12.5:1, 12.6:1, 12.7:1, 12.8:1, 12.9:1, 13.0:1, 13.1:1, 13.2:1, 13.3:1, 13.4:1, 13.5:1, 13.6:1, 13.7:1, 13.8:1, 13.9:1, 14.0:1, 14.1:1, 14.2:1, 14.3:1, 14.4:1, 14.5:1, 14.6:1, 14.7:1, 14.8:1, 14.9:1, 15.0:1, 15.1:1, 15.2:1, 15.3:1, 15.4:1, 15.5:1, 15.6:1, 15.7:1, 15.8:1, 15.9:1, or 16.0:1; from 6.2:1 to: 6.3:1, 6.4:1, 6.5:1, 6.6:1, 6.7:1, 6.8:1, 6.9:1, 7.0:1, 7.1:1, 7.2:1, 7.3:1, 7.4:1, 7.5:1, 7.6:1, 7.7:1, 7.8:1, 7.9:1, 8.0:1, 8.1:1, 8.2:1, 8.3:1, 8.4:1, 8.5:1, 8.6:1, 8.7:1, 8.8:1, 8.9:1, 9.0:1, 9.1:1, 9.2:1, 9.3:1, 9.4:1, 9.5:1, 9.6:1, 9.7:1, 9.8:1, 9.9:1, 10.0:1, 10.1:1, 10.2:1, 10.3:1, 10.4:1, 10.5:1, 10.6:1, 10.7:1, 10.8:1, 10.9:1, 11.0:1, 11.1:1, 11.2:1, 11.3:1, 11.4:1, 11.5:1, 11.6:1, 11.7:1, 11.8:1, 11.9:1, 12.0:1, 12.1:1, 12.2:1, 12.3:1, 12.4:1, 12.5:1, 12.6:1, 12.7:1, 12.8:1, 12.9:1, 13.0:1, 13.1:1, 13.2:1, 13.3:1, 13.4:1, 13.5:1, 13.6:1, 13.7:1, 13.8:1, 13.9:1, 14.0:1, 14.1:1, 14.2:1, 14.3:1, 14.4:1, 14.5:1, 14.6:1, 14.7:1, 14.8:1, 14.9:1, 15.0:1, 15.1:1, 15.2:1, 15.3:1, 15.4:1, 15.5:1, 15.6:1, 15.7:1, 15.8:1, 15.9:1, or 16.0:1; from 6.3:1 to: 6.4:1, 6.5:1, 6.6:1, 6.7:1, 6.8:1, 6.9:1, 7.0:1, 7.1:1, 7.2:1, 7.3:1, 7.4:1, 7.5:1, 7.6:1, 7.7:1, 7.8:1, 7.9:1, 8.0:1, 8.1:1, 8.2:1, 8.3:1, 8.4:1, 8.5:1, 8.6:1, 8.7:1, 8.8:1, 8.9:1, 9.0:1, 9.1:1, 9.2:1, 9.3:1, 9.4:1, 9.5:1, 9.6:1, 9.7:1, 9.8:1, 9.9:1, 10.0:1, 10.1:1, 10.2:1, 10.3:1, 10.4:1, 10.5:1, 10.6:1, 10.7:1, 10.8:1, 10.9:1, 11.0:1, 11.1:1, 11.2:1, 11.3:1, 11.4:1, 11.5:1, 11.6:1, 11.7:1, 11.8:1, 11.9:1, 12.0:1, 12.1:1, 12.2:1, 12.3:1, 12.4:1, 12.5:1, 12.6:1, 12.7:1, 12.8:1, 12.9:1, 13.0:1, 13.1:1, 13.2:1, 13.3:1, 13.4:1, 13.5:1, 13.6:1, 13.7:1, 13.8:1, 13.9:1, 14.0:1, 14.1:1, 14.2:1, 14.3:1, 14.4:1, 14.5:1, 14.6:1, 14.7:1, 14.8:1, 14.9:1, 15.0:1, 15.1:1, 15.2:1, 15.3:1, 15.4:1, 15.5:1, 15.6:1, 15.7:1, 15.8:1, 15.9:1, or 16.0:1; from 6.4:1 to: 6.5:1, 6.6:1, 6.7:1, 6.8:1, 6.9:1, 7.0:1, 7.1:1, 7.2:1, 7.3:1, 7.4:1, 7.5:1, 7.6:1, 7.7:1, 7.8:1, 7.9:1, 8.0:1, 8.1:1, 8.2:1, 8.3:1, 8.4:1, 8.5:1, 8.6:1, 8.7:1, 8.8:1, 8.9:1, 9.0:1, 9.1:1, 9.2:1, 9.3:1, 9.4:1, 9.5:1, 9.6:1, 9.7:1, 9.8:1, 9.9:1, 10.0:1, 10.1:1, 10.2:1, 10.3:1, 10.4:1, 10.5:1, 10.6:1, 10.7:1, 10.8:1, 10.9:1, 11.0:1, 11.1:1, 11.2:1, 11.3:1, 11.4:1, 11.5:1, 11.6:1, 11.7:1, 11.8:1, 11.9:1, 12.0:1, 12.1:1, 12.2:1, 12.3:1, 12.4:1, 12.5:1, 12.6:1, 12.7:1, 12.8:1, 12.9:1, 13.0:1, 13.1:1, 13.2:1, 13.3:1, 13.4:1, 13.5:1, 13.6:1, 13.7:1, 13.8:1, 13.9:1, 14.0:1, 14.1:1, 14.2:1, 14.3:1, 14.4:1, 14.5:1, 14.6:1, 14.7:1, 14.8:1, 14.9:1, 15.0:1, 15.1:1, 15.2:1, 15.3:1, 15.4:1, 15.5:1, 15.6:1, 15.7:1, 15.8:1, 15.9:1, or 16.0:1; from 6.5:1 to: 6.6:1, 6.7:1, 6.8:1, 6.9:1, 7.0:1, 7.1:1, 7.2:1, 7.3:1, 7.4:1, 7.5:1, 7.6:1, 7.7:1, 7.8:1, 7.9:1, 8.0:1, 8.1:1, 8.2:1, 8.3:1, 8.4:1, 8.5:1, 8.6:1, 8.7:1, 8.8:1, 8.9:1, 9.0:1, 9.1:1, 9.2:1, 9.3:1, 9.4:1, 9.5:1, 9.6:1, 9.7:1, 9.8:1, 9.9:1, 10.0:1, 10.1:1, 10.2:1, 10.3:1, 10.4:1, 10.5:1, 10.6:1, 10.7:1, 10.8:1, 10.9:1, 11.0:1, 11.1:1, 11.2:1, 11.3:1, 11.4:1, 11.5:1, 11.6:1, 11.7:1, 11.8:1, 11.9:1, 12.0:1, 12.1:1, 12.2:1, 12.3:1, 12.4:1, 12.5:1, 12.6:1, 12.7:1, 12.8:1, 12.9:1, 13.0:1, 13.1:1, 13.2:1, 13.3:1, 13.4:1, 13.5:1, 13.6:1, 13.7:1, 13.8:1, 13.9:1, 14.0:1, 14.1:1, 14.2:1, 14.3:1, 14.4:1, 14.5:1, 14.6:1, 14.7:1, 14.8:1, 14.9:1, 15.0:1, 15.1:1, 15.2:1, 15.3:1, 15.4:1, 15.5:1, 15.6:1, 15.7:1, 15.8:1, 15.9:1, or 16.0:1; from 6.6:1 to: 6.7:1, 6.8:1, 6.9:1, 7.0:1, 7.1:1, 7.2:1, 7.3:1, 7.4:1, 7.5:1, 7.6:1, 7.7:1, 7.8:1, 7.9:1, 8.0:1, 8.1:1, 8.2:1, 8.3:1, 8.4:1, 8.5:1, 8.6:1, 8.7:1, 8.8:1, 8.9:1, 9.0:1, 9.1:1, 9.2:1, 9.3:1, 9.4:1, 9.5:1, 9.6:1, 9.7:1, 9.8:1, 9.9:1, 10.0:1, 10.1:1, 10.2:1, 10.3:1, 10.4:1, 10.5:1, 10.6:1, 10.7:1, 10.8:1, 10.9:1, 11.0:1, 11.1:1, 11.2:1, 11.3:1, 11.4:1, 11.5:1, 11.6:1, 11.7:1, 11.8:1, 11.9:1, 12.0:1, 12.1:1, 12.2:1, 12.3:1, 12.4:1, 12.5:1, 12.6:1, 12.7:1, 12.8:1, 12.9:1, 13.0:1, 13.1:1, 13.2:1, 13.3:1, 13.4:1, 13.5:1, 13.6:1, 13.7:1, 13.8:1, 13.9:1, 14.0:1, 14.1:1, 14.2:1, 14.3:1, 14.4:1, 14.5:1, 14.6:1, 14.7:1, 14.8:1, 14.9:1, 15.0:1, 15.1:1, 15.2:1, 15.3:1, 15.4:1, 15.5:1, 15.6:1, 15.7:1, 15.8:1, 15.9:1, or 16.0:1; from 6.7:1 to: 6.8:1, 6.9:1, 7.0:1, 7.1:1, 7.2:1, 7.3:1, 7.4:1, 7.5:1, 7.6:1, 7.7:1, 7.8:1, 7.9:1, 8.0:1, 8.1:1, 8.2:1, 8.3:1, 8.4:1, 8.5:1, 8.6:1, 8.7:1, 8.8:1, 8.9:1, 9.0:1, 9.1:1, 9.2:1, 9.3:1, 9.4:1, 9.5:1, 9.6:1, 9.7:1, 9.8:1, 9.9:1, 10.0:1, 10.1:1, 10.2:1, 10.3:1, 10.4:1, 10.5:1, 10.6:1, 10.7:1, 10.8:1, 10.9:1, 11.0:1, 11.1:1, 11.2:1, 11.3:1, 11.4:1, 11.5:1, 11.6:1, 11.7:1, 11.8:1, 11.9:1, 12.0:1, 12.1:1, 12.2:1, 12.3:1, 12.4:1, 12.5:1, 12.6:1, 12.7:1, 12.8:1, 12.9:1, 13.0:1, 13.1:1, 13.2:1, 13.3:1, 13.4:1, 13.5:1, 13.6:1, 13.7:1, 13.8:1, 13.9:1, 14.0:1, 14.1:1, 14.2:1, 14.3:1, 14.4:1, 14.5:1, 14.6:1, 14.7:1, 14.8:1, 14.9:1, 15.0:1, 15.1:1, 15.2:1, 15.3:1, 15.4:1, 15.5:1, 15.6:1, 15.7:1, 15.8:1, 15.9:1, or 16.0:1; from 6.8:1 to: 6.9:1, 7.0:1, 7.1:1, 7.2:1, 7.3:1, 7.4:1, 7.5:1, 7.6:1, 7.7:1, 7.8:1, 7.9:1, 8.0:1, 8.1:1, 8.2:1, 8.3:1, 8.4:1, 8.5:1, 8.6:1, 8.7:1, 8.8:1, 8.9:1, 9.0:1, 9.1:1, 9.2:1, 9.3:1, 9.4:1, 9.5:1, 9.6:1, 9.7:1, 9.8:1, 9.9:1, 10.0:1, 10.1:1, 10.2:1, 10.3:1, 10.4:1, 10.5:1, 10.6:1, 10.7:1, 10.8:1, 10.9:1, 11.0:1, 11.1:1, 11.2:1, 11.3:1, 11.4:1, 11.5:1, 11.6:1, 11.7:1, 11.8:1, 11.9:1, 12.0:1, 12.1:1, 12.2:1, 12.3:1, 12.4:1, 12.5:1, 12.6:1, 12.7:1, 12.8:1, 12.9:1, 13.0:1, 13.1:1, 13.2:1, 13.3:1, 13.4:1, 13.5:1, 13.6:1, 13.7:1, 13.8:1, 13.9:1, 14.0:1, 14.1:1, 14.2:1, 14.3:1, 14.4:1, 14.5:1, 14.6:1, 14.7:1, 14.8:1, 14.9:1, 15.0:1, 15.1:1, 15.2:1, 15.3:1, 15.4:1, 15.5:1, 15.6:1, 15.7:1, 15.8:1, 15.9:1, or 16.0:1; from 6.9:1 to: 7.0:1, 7.1:1, 7.2:1, 7.3:1, 7.4:1, 7.5:1, 7.6:1, 7.7:1, 7.8:1, 7.9:1, 8.0:1, 8.1:1, 8.2:1, 8.3:1, 8.4:1, 8.5:1, 8.6:1, 8.7:1, 8.8:1, 8.9:1, 9.0:1, 9.1:1, 9.2:1, 9.3:1, 9.4:1, 9.5:1, 9.6:1, 9.7:1, 9.8:1, 9.9:1, 10.0:1, 10.1:1, 10.2:1, 10.3:1, 10.4:1, 10.5:1, 10.6:1, 10.7:1, 10.8:1, 10.9:1, 11.0:1, 11.1:1, 11.2:1, 11.3:1, 11.4:1, 11.5:1, 11.6:1, 11.7:1, 11.8:1, 11.9:1, 12.0:1, 12.1:1, 12.2:1, 12.3:1, 12.4:1, 12.5:1, 12.6:1, 12.7:1, 12.8:1, 12.9:1, 13.0:1, 13.1:1, 13.2:1, 13.3:1, 13.4:1, 13.5:1, 13.6:1, 13.7:1, 13.8:1, 13.9:1, 14.0:1, 14.1:1, 14.2:1, 14.3:1, 14.4:1, 14.5:1, 14.6:1, 14.7:1, 14.8:1, 14.9:1, 15.0:1, 15.1:1, 15.2:1, 15.3:1, 15.4:1, 15.5:1, 15.6:1, 15.7:1, 15.8:1, 15.9:1, or 16.0:1; from 7.0:1 to: 7.1:1, 7.2:1, 7.3:1, 7.4:1, 7.5:1, 7.6:1, 7.7:1, 7.8:1, 7.9:1, 8.0:1, 8.1:1, 8.2:1, 8.3:1, 8.4:1, 8.5:1, 8.6:1, 8.7:1, 8.8:1, 8.9:1, 9.0:1, 9.1:1, 9.2:1, 9.3:1, 9.4:1, 9.5:1, 9.6:1, 9.7:1, 9.8:1, 9.9:1, 10.0:1, 10.1:1, 10.2:1, 10.3:1, 10.4:1, 10.5:1, 10.6:1, 10.7:1, 10.8:1, 10.9:1, 11.0:1, 11.1:1, 11.2:1, 11.3:1, 11.4:1, 11.5:1, 11.6:1, 11.7:1, 11.8:1, 11.9:1, 12.0:1, 12.1:1, 12.2:1, 12.3:1, 12.4:1, 12.5:1, 12.6:1, 12.7:1, 12.8:1, 12.9:1, 13.0:1, 13.1:1, 13.2:1, 13.3:1, 13.4:1, 13.5:1, 13.6:1, 13.7:1, 13.8:1, 13.9:1, 14.0:1, 14.1:1, 14.2:1, 14.3:1, 14.4:1, 14.5:1, 14.6:1, 14.7:1, 14.8:1, 14.9:1, 15.0:1, 15.1:1, 15.2:1, 15.3:1, 15.4:1, 15.5:1, 15.6:1, 15.7:1, 15.8:1, 15.9:1, or 16.0:1; from 7.1:1 to: 7.2:1, 7.3:1, 7.4:1, 7.5:1, 7.6:1, 7.7:1, 7.8:1, 7.9:1, 8.0:1, 8.1:1, 8.2:1, 8.3:1, 8.4:1, 8.5:1, 8.6:1, 8.7:1, 8.8:1, 8.9:1, 9.0:1, 9.1:1, 9.2:1, 9.3:1, 9.4:1, 9.5:1, 9.6:1, 9.7:1, 9.8:1, 9.9:1, 10.0:1, 10.1:1, 10.2:1, 10.3:1, 10.4:1, 10.5:1, 10.6:1, 10.7:1, 10.8:1, 10.9:1, 11.0:1, 11.1:1, 11.2:1, 11.3:1, 11.4:1, 11.5:1, 11.6:1, 11.7:1, 11.8:1, 11.9:1, 12.0:1, 12.1:1, 12.2:1, 12.3:1, 12.4:1, 12.5:1, 12.6:1, 12.7:1, 12.8:1, 12.9:1, 13.0:1, 13.1:1, 13.2:1, 13.3:1, 13.4:1, 13.5:1, 13.6:1, 13.7:1, 13.8:1, 13.9:1, 14.0:1, 14.1:1, 14.2:1, 14.3:1, 14.4:1, 14.5:1, 14.6:1, 14.7:1, 14.8:1, 14.9:1, 15.0:1, 15.1:1, 15.2:1, 15.3:1, 15.4:1, 15.5:1, 15.6:1, 15.7:1, 15.8:1, 15.9:1, or 16.0:1; from 7.2:1 to: 7.3:1, 7.4:1, 7.5:1, 7.6:1, 7.7:1, 7.8:1, 7.9:1, 8.0:1, 8.1:1, 8.2:1, 8.3:1, 8.4:1, 8.5:1, 8.6:1, 8.7:1, 8.8:1, 8.9:1, 9.0:1, 9.1:1, 9.2:1, 9.3:1, 9.4:1, 9.5:1, 9.6:1, 9.7:1, 9.8:1, 9.9:1, 10.0:1, 10.1:1, 10.2:1, 10.3:1, 10.4:1, 10.5:1, 10.6:1, 10.7:1, 10.8:1, 10.9:1, 11.0:1, 11.1:1, 11.2:1, 11.3:1, 11.4:1, 11.5:1, 11.6:1, 11.7:1, 11.8:1, 11.9:1, 12.0:1, 12.1:1, 12.2:1, 12.3:1, 12.4:1, 12.5:1, 12.6:1, 12.7:1, 12.8:1, 12.9:1, 13.0:1, 13.1:1, 13.2:1, 13.3:1, 13.4:1, 13.5:1, 13.6:1, 13.7:1, 13.8:1, 13.9:1, 14.0:1, 14.1:1, 14.2:1, 14.3:1, 14.4:1, 14.5:1, 14.6:1, 14.7:1, 14.8:1, 14.9:1, 15.0:1, 15.1:1, 15.2:1, 15.3:1, 15.4:1, 15.5:1, 15.6:1, 15.7:1, 15.8:1, 15.9:1, or 16.0:1; from 7.3:1 to: 7.4:1, 7.5:1, 7.6:1, 7.7:1, 7.8:1, 7.9:1, 8.0:1, 8.1:1, 8.2:1, 8.3:1, 8.4:1, 8.5:1, 8.6:1, 8.7:1, 8.8:1, 8.9:1, 9.0:1, 9.1:1, 9.2:1, 9.3:1, 9.4:1, 9.5:1, 9.6:1, 9.7:1, 9.8:1, 9.9:1, 10.0:1, 10.1:1, 10.2:1, 10.3:1, 10.4:1, 10.5:1, 10.6:1, 10.7:1, 10.8:1, 10.9:1, 11.0:1, 11.1:1, 11.2:1, 11.3:1, 11.4:1, 11.5:1, 11.6:1, 11.7:1, 11.8:1, 11.9:1, 12.0:1, 12.1:1, 12.2:1, 12.3:1, 12.4:1, 12.5:1, 12.6:1, 12.7:1, 12.8:1, 12.9:1, 13.0:1, 13.1:1, 13.2:1, 13.3:1, 13.4:1, 13.5:1, 13.6:1, 13.7:1, 13.8:1, 13.9:1, 14.0:1, 14.1:1, 14.2:1, 14.3:1, 14.4:1, 14.5:1, 14.6:1, 14.7:1, 14.8:1, 14.9:1, 15.0:1, 15.1:1, 15.2:1, 15.3:1, 15.4:1, 15.5:1, 15.6:1, 15.7:1, 15.8:1, 15.9:1, or 16.0:1; from 7.4:1 to: 7.5:1, 7.6:1, 7.7:1, 7.8:1, 7.9:1, 8.0:1, 8.1:1, 8.2:1, 8.3:1, 8.4:1, 8.5:1, 8.6:1, 8.7:1, 8.8:1, 8.9:1, 9.0:1, 9.1:1, 9.2:1, 9.3:1, 9.4:1, 9.5:1, 9.6:1, 9.7:1, 9.8:1, 9.9:1, 10.0:1, 10.1:1, 10.2:1, 10.3:1, 10.4:1, 10.5:1, 10.6:1, 10.7:1, 10.8:1, 10.9:1, 11.0:1, 11.1:1, 11.2:1, 11.3:1, 11.4:1, 11.5:1, 11.6:1, 11.7:1, 11.8:1, 11.9:1, 12.0:1, 12.1:1, 12.2:1, 12.3:1, 12.4:1, 12.5:1, 12.6:1, 12.7:1, 12.8:1, 12.9:1, 13.0:1, 13.1:1, 13.2:1, 13.3:1, 13.4:1, 13.5:1, 13.6:1, 13.7:1, 13.8:1, 13.9:1, 14.0:1, 14.1:1, 14.2:1, 14.3:1, 14.4:1, 14.5:1, 14.6:1, 14.7:1, 14.8:1, 14.9:1, 15.0:1, 15.1:1, 15.2:1, 15.3:1, 15.4:1, 15.5:1, 15.6:1, 15.7:1, 15.8:1, 15.9:1, or 16.0:1; from 7.5:1 to: 7.6:1, 7.7:1, 7.8:1, 7.9:1, 8.0:1, 8.1:1, 8.2:1, 8.3:1, 8.4:1, 8.5:1, 8.6:1, 8.7:1, 8.8:1, 8.9:1, 9.0:1, 9.1:1, 9.2:1, 9.3:1, 9.4:1, 9.5:1, 9.6:1, 9.7:1, 9.8:1, 9.9:1, 10.0:1, 10.1:1, 10.2:1, 10.3:1, 10.4:1, 10.5:1, 10.6:1, 10.7:1, 10.8:1, 10.9:1, 11.0:1, 11.1:1, 11.2:1, 11.3:1, 11.4:1, 11.5:1, 11.6:1, 11.7:1, 11.8:1, 11.9:1, 12.0:1, 12.1:1, 12.2:1, 12.3:1, 12.4:1, 12.5:1, 12.6:1, 12.7:1, 12.8:1, 12.9:1, 13.0:1, 13.1:1, 13.2:1, 13.3:1, 13.4:1, 13.5:1, 13.6:1, 13.7:1, 13.8:1, 13.9:1, 14.0:1, 14.1:1, 14.2:1, 14.3:1, 14.4:1, 14.5:1, 14.6:1, 14.7:1, 14.8:1, 14.9:1, 15.0:1, 15.1:1, 15.2:1, 15.3:1, 15.4:1, 15.5:1, 15.6:1, 15.7:1, 15.8:1, 15.9:1, or 16.0:1; from 7.6:1 to 7.7:1, 7.8:1, 7.9:1, 8.0:1, 8.1:1, 8.2:1, 8.3:1, 8.4:1, 8.5:1, 8.6:1, 8.7:1, 8.8:1, 8.9:1, 9.0:1, 9.1:1, 9.2:1, 9.3:1, 9.4:1, 9.5:1, 9.6:1, 9.7:1, 9.8:1, 9.9:1, 10.0:1, 10.1:1, 10.2:1, 10.3:1, 10.4:1, 10.5:1, 10.6:1, 10.7:1, 10.8:1, 10.9:1, 11.0:1, 11.1:1, 11.2:1, 11.3:1, 11.4:1, 11.5:1, 11.6:1, 11.7:1, 11.8:1, 11.9:1, 12.0:1, 12.1:1, 12.2:1, 12.3:1, 12.4:1, 12.5:1, 12.6:1, 12.7:1, 12.8:1, 12.9:1, 13.0:1, 13.1:1, 13.2:1, 13.3:1, 13.4:1, 13.5:1, 13.6:1, 13.7:1, 13.8:1, 13.9:1, 14.0:1, 14.1:1, 14.2:1, 14.3:1, 14.4:1, 14.5:1, 14.6:1, 14.7:1, 14.8:1, 14.9:1, 15.0:1, 15.1:1, 15.2:1, 15.3:1, 15.4:1, 15.5:1, 15.6:1, 15.7:1, 15.8:1, 15.9:1, or 16.0:1; from 7.7:1 to: 7.8:1, 7.9:1, 8.0:1, 8.1:1, 8.2:1, 8.3:1, 8.4:1, 8.5:1, 8.6:1, 8.7:1, 8.8:1, 8.9:1, 9.0:1, 9.1:1, 9.2:1, 9.3:1, 9.4:1, 9.5:1, 9.6:1, 9.7:1, 9.8:1, 9.9:1, 10.0:1, 10.1:1, 10.2:1, 10.3:1, 10.4:1, 10.5:1, 10.6:1, 10.7:1, 10.8:1, 10.9:1, 11.0:1, 11.1:1, 11.2:1, 11.3:1, 11.4:1, 11.5:1, 11.6:1, 11.7:1, 11.8:1, 11.9:1, 12.0:1, 12.1:1, 12.2:1, 12.3:1, 12.4:1, 12.5:1, 12.6:1, 12.7:1, 12.8:1, 12.9:1, 13.0:1, 13.1:1, 13.2:1, 13.3:1, 13.4:1, 13.5:1, 13.6:1, 13.7:1, 13.8:1, 13.9:1, 14.0:1, 14.1:1, 14.2:1, 14.3:1, 14.4:1, 14.5:1, 14.6:1, 14.7:1, 14.8:1, 14.9:1, 15.0:1, 15.1:1, 15.2:1, 15.3:1, 15.4:1, 15.5:1, 15.6:1, 15.7:1, 15.8:1, 15.9:1, or 16.0:1; from 7.8:1 to: 7.9:1, 8.0:1, 8.1:1, 8.2:1, 8.3:1, 8.4:1, 8.5:1, 8.6:1, 8.7:1, 8.8:1, 8.9:1, 9.0:1, 9.1:1, 9.2:1, 9.3:1, 9.4:1, 9.5:1, 9.6:1, 9.7:1, 9.8:1, 9.9:1, 10.0:1, 10.1:1, 10.2:1, 10.3:1, 10.4:1, 10.5:1, 10.6:1, 10.7:1, 10.8:1, 10.9:1, 11.0:1, 11.1:1, 11.2:1, 11.3:1, 11.4:1, 11.5:1, 11.6:1, 11.7:1, 11.8:1, 11.9:1, 12.0:1, 12.1:1, 12.2:1, 12.3:1, 12.4:1, 12.5:1, 12.6:1, 12.7:1, 12.8:1, 12.9:1, 13.0:1, 13.1:1, 13.2:1, 13.3:1, 13.4:1, 13.5:1, 13.6:1, 13.7:1, 13.8:1, 13.9:1, 14.0:1, 14.1:1, 14.2:1, 14.3:1, 14.4:1, 14.5:1, 14.6:1, 14.7:1, 14.8:1, 14.9:1, 15.0:1, 15.1:1, 15.2:1, 15.3:1, 15.4:1, 15.5:1, 15.6:1, 15.7:1, 15.8:1, 15.9:1, or 16.0:1; or from 7.9:1 to: 8.0:1, 8.1:1, 8.2:1, 8.3:1, 8.4:1, 8.5:1, 8.6:1, 8.7:1, 8.8:1, 8.9:1, 9.0:1, 9.1:1, 9.2:1, 9.3:1, 9.4:1, 9.5:1, 9.6:1, 9.7:1, 9.8:1, 9.9:1, 10.0:1, 10.1:1, 10.2:1, 10.3:1, 10.4:1, 10.5:1, 10.6:1, 10.7:1, 10.8:1, 10.9:1, 11.0:1, 11.1:1, 11.2:1, 11.3:1, 11.4:1, 11.5:1, 11.6:1, 11.7:1, 11.8:1, 11.9:1, 12.0:1, 12.1:1, 12.2:1, 12.3:1, 12.4:1, 12.5:1, 12.6:1, 12.7:1, 12.8:1, 12.9:1, 13.0:1, 13.1:1, 13.2:1, 13.3:1, 13.4:1, 13.5:1, 13.6:1, 13.7:1, 13.8:1, 13.9:1, 14.0:1, 14.1:1, 14.2:1, 14.3:1, 14.4:1, 14.5:1, 14.6:1, 14.7:1, 14.8:1, 14.9:1, 15.0:1, 15.1:1, 15.2:1, 15.3:1, 15.4:1, 15.5:1, 15.6:1, 15.7:1, 15.8:1, 15.9:1, or 16.0:1. Also contemplated and supported are combinations of the above-noted “ratio of the number of nitrogen in the lipids of the LNP to the phosphorous atoms in the recombinant RNA molecules (N:P) from” and “ratio of the number of nitrogen in the lipids of the LNP to the phosphorous atoms in the recombinant RNA molecules (N:P) to” with that provided in the Examples section of this document. Also contemplated and supported are combinations of the “ratio of the number of nitrogen in the lipids of the LNP to the phosphorous atoms in the recombinant RNA molecules (N:P)” of the Example section of this document to provide a range (i.e. “ratio of the number of nitrogen in the lipids of the LNP to the phosphorous atoms in the recombinant RNA molecules (N:P) from [the N:P ratio of formulation X₁] to [N:P ratio of formulation X₂] wherein X₁ and X₂ represent any two exemplary LNP formulations of the Examples.

### Making the LNP Comprising the RNA Molecules

[0468] As noted above, In some embodiments, the recombinant RNA molecules are comprised or encapsulated within the LNPs. In some embodiments, the recombinant RNA molecules and lipids of the LNPs can be admixed and/or purified to thereby provide said comprising or encapsulating within. In some embodiments, the RNA molecules and lipids of the LNP can be admixed and/or purified to thereby provide the above-noted proportions of recombinant RNA molecules comprised or encapsulated within the LNPs.

[0469] In some aspects, a method of obtaining a composition is provided, the composition comprising the recombinant RNA molecules and LNPs, wherein the recombinant molecules are comprised or encapsulated within the LNPs in the above-noted proportions, wherein the LNPs comprise the above-noted lipids; the method comprising admixing a first solution, which comprises the recombinant RNA molecules, and a second solution, which comprises the above-noted lipids. In some embodiments, the admixing is performed by at least a T-mixer, microfluidics, or an impinging jet mixer. In some embodiments, the first solution further comprises citrate buffer (e.g. sodium citrate) or acetate buffer (e.g. sodium acetate).

[0470] In some embodiments, the second solution further comprises an organic solvent. In some embodiments, the organic solvent comprises chloroform, dichloromethane, diethylether, cyclohexane, cyclopentane, benzene, toluene, methanol, benzyl alcohol, and aliphatic alcohols (e.g. C₁ to C₈ alcohols). In some embodiments, the aliphatic alcohols comprise ethanol, propanol, isopropanol, butanol, tert-buranol, isobutanol, pentanol, benzyl alcohol, and hexanol. In some embodiments, the organic solvent comprises an alcohol solution. In some embodiments, the organic alcohol solution comprises from 70 volume % to 100 volume % ethanol.

[0471] In some embodiments, the method comprises admixing a first solution, which comprises the recombinant RNA molecules and the above-noted lipids of the LNP, and a second solution, which is an aqueous solution. In some embodiments, the RNA and lipids of the LNP are admixed in an organic solvent. In some embodiments, the organic solvent comprises chloroform, dichloromethane, diethylether, cyclohexane, cyclopentane, benzene, toluene, methanol, benzyl alcohol, and aliphatic alcohols (e.g. C₁ to C₈ alcohols). In some embodiments, the aliphatic alcohols comprise ethanol, propanol, isopropanol, butanol, tert-buranol, isobutanol, pentanol, benzyl alcohol, and hexanol. In some embodiments, the organic solvent comprises an alcohol solution. In some embodiments, the organic alcohol solution comprises from 70 volume % to 100 volume % ethanol. In some embodiments, the organic alcohol solution comprises from 70 volume % to 100 volume % ethanol and 30 volume % to 0 volume % benzyl alcohol. In some embodiments, the aqueous solution comprises a citrate buffer (e.g. sodium citrate) or an acetate buffer (e.g. sodium acetate). In some embodiments, the first and second solution are admixed at a ratio from 1:1 to 5:1, from 2:1 to 4:1, from 2.5:1 to 3.5:1, or at 3:1.

[0472] In some embodiments, the admixing of the first and second solutions (i.e. of either of the two above-noted methods) is at a pH from 4.5 to the pKa of the first lipid (e.g. the cation-ionizable lipid), thereby obtaining a first admixture. In some embodiments, the admixing of the first and second solutions is at a pH from 4.5, 4.6, 4.7, 4.8, 4.9, 5.0, 5.1, 5.2, 5.3, 5.4, 5.5, 5.6, 5.7, 5.8, 5.9, or 6.0 to the pKa of the first lipid (e.g. the cation-ionizable lipid), thereby obtaining a first admixture. In some embodiments, the method further comprises a first increasing, which is increasing the pH of the first admixture to be equal to or above the pKa of the first lipid to thereby obtain a pH-adjusted first admixture. In some embodiments, the first increasing obtains a pH-adjusted first admixture with a pH from the pKa of the first lipid (e.g. cation-ionizable lipid) to: 9.0, 8.9, 8.8, 8.7, 8.6, 8.5, 8.4, 8.3, 8.2, 8.1, 8.0, 7.9, 7.8, 7.7, 7.6, 7.5, 7.4, 7.3, 7.2, 7.1, or 7.0.

[0473] In some embodiments, the first increasing or purifying comprises cross-flow filtration or tangential-flow filtration. In some embodiments, the first increasing or purifying further comprises transferring the composition comprising the LNPs and the recombinant RNA molecules into a third solution, which differs from the first solution. In some embodiments, the third solution comprises phosphate-buffered saline. In some embodiments, the transferring comprises dialysis. In some embodiments, the tangential-flow filtration comprises the use of a hollow fiber filter. In some embodiments, the hollow fiber comprises a polyethersulfone hollow fiber filter or a polysulfone hollow fiber filter. In some embodiments, the hollow fiber filter (e.g. polyethersulfone hollow fiber filter) has a pore size cutoff of at least 75 kDa, 76 kDa, 77 kDa, 78 kDa, 79 kDa, 80 kDa, 81 kDa, 82 kDa, 83 kDa, 84 kDa, 85 kDa, 86 kDa, 87 kDa, 88 kDa, 89 kDa, 90 kDa, 91 kDa, 92 kDa, 93 kDa, 94 kDa, 95 kDa, 96 kDa, 97 kDa, 98 kDa, 99 kDa, 100 kDa, 101 kDa, 102 kDa, 103 kDa, 104 kDa, 105 kDa, 106 kDa, 107 kDa, 108 kDa, 109 kDa, 110 kDa, 111 kDa, 112 kDa, 113 kDa, 114 kDa, 115 kDa, 116 kDa, 117 kDa, 118 kDa, 119 kDa, or 120 kDa. In some embodiments, the hollow fiber filter (e.g. polyethersulfone hollow fiber filter) has a pore size cutoff of no more than 80 kDa, 81 kDa, 82 kDa, 83 kDa, 84 kDa, 85 kDa, 86 kDa, 87 kDa, 88 kDa, 89 kDa, 90 kDa, 91 kDa, 92 kDa, 93 kDa, 94 kDa, 95 kDa, 96 kDa, 97 kDa, 98 kDa, 99 kDa, 100 kDa, 101 kDa, 102 kDa, 103 kDa, 104 kDa, 105 kDa, 106 kDa, 107 kDa, 108 kDa, 109 kDa, 110 kDa, 111 kDa, 112 kDa, 113 kDa, 114 kDa, 115 kDa, 116 kDa, 117 kDa, 118 kDa, 119 kDa, 120 kDa, 121 kDa, 122 kDa, 123 kDa, 124 kDa, 125 kDa, 126 kDa, 127 kDa, 128 kDa, 129 kDa, 130 kDa, 131 kDa, 132 kDa, 133 kDa, 134 kDa, 135 kDa, 136 kDa, 137 kDa, 138 kDa, 139 kDa, or 140 kDa. Taking the above-noted embodiments into account, it is contemplated and supported that any of the above-noted pore size cut offs “of at least” and “of no more than” may be combined to provide an enclosed range (i.e. a pore size cut off from 85 kDa to 120 kDa). In some embodiments, the hollow fiber filter (e.g. polyethersulfone hollow fiber filter) has a pore size cutoff of: from 75 kDa to: 76 kDa, 77 kDa, 78 kDa, 79 kDa, 80 kDa, 81 kDa, 82 kDa, 83 kDa, 84 kDa, 85 kDa, 86 kDa, 87 kDa, 88 kDa, 89 kDa, 90 kDa, 91 kDa, 92 kDa, 93 kDa, 94 kDa, 95 kDa, 96 kDa, 97 kDa, 98 kDa, 99 kDa, 100 kDa, 101 kDa, 102 kDa, 103 kDa, 104 kDa, 105 kDa, 106 kDa, 107 kDa, 108 kDa, 109 kDa, 110 kDa, 111 kDa, 112 kDa, 113 kDa, 114 kDa, 115 kDa, 116 kDa, 117 kDa, 118 kDa, 119 kDa, 120 kDa, 121 kDa, 122 kDa, 123 kDa, 124 kDa, 125 kDa, 126 kDa, 127 kDa, 128 kDa, 129 kDa, 130 kDa, 131 kDa, 132 kDa, 133 kDa, 134 kDa, 135 kDa, 136 kDa, 137 kDa, 138 kDa, 139 kDa, or 140 kDa; from 76 kDa to: 77 kDa, 78 kDa, 79 kDa, 80 kDa, 81 kDa, 82 kDa, 83 kDa, 84 kDa, 85 kDa, 86 kDa, 87 kDa, 88 kDa, 89 kDa, 90 kDa, 91 kDa, 92 kDa, 93 kDa, 94 kDa, 95 kDa, 96 kDa, 97 kDa, 98 kDa, 99 kDa, 100 kDa, 101 kDa, 102 kDa, 103 kDa, 104 kDa, 105 kDa, 106 kDa, 107 kDa, 108 kDa, 109 kDa, 110 kDa, 111 kDa, 112 kDa, 113 kDa, 114 kDa, 115 kDa, 116 kDa, 117 kDa, 118 kDa, 119 kDa, 120 kDa, 121 kDa, 122 kDa, 123 kDa, 124 kDa, 125 kDa, 126 kDa, 127 kDa, 128 kDa, 129 kDa, 130 kDa, 131 kDa, 132 kDa, 133 kDa, 134 kDa, 135 kDa, 136 kDa, 137 kDa, 138 kDa, 139 kDa, or 140 kDa; from 77 kDa: to: 78 kDa, 79 kDa, 80 kDa, 81 kDa, 82 kDa, 83 kDa, 84 kDa, 85 kDa, 86 kDa, 87 kDa, 88 kDa, 89 kDa, 90 kDa, 91 kDa, 92 kDa, 93 kDa, 94 kDa, 95 kDa, 96 kDa, 97 kDa, 98 kDa, 99 kDa, 100 kDa, 101 kDa, 102 kDa, 103 kDa, 104 kDa, 105 kDa, 106 kDa, 107 kDa, 108 kDa, 109 kDa, 110 kDa, 111 kDa, 112 kDa, 113 kDa, 114 kDa, 115 kDa, 116 kDa, 117 kDa, 118 kDa, 119 kDa, 120 kDa, 121 kDa, 122 kDa, 123 kDa, 124 kDa, 125 kDa, 126 kDa, 127 kDa, 128 kDa, 129 kDa, 130 kDa, 131 kDa, 132 kDa, 133 kDa, 134 kDa, 135 kDa, 136 kDa, 137 kDa, 138 kDa, 139 kDa, or 140 kDa; from 78 kDa to: 79 kDa, 80 kDa, 81 kDa, 82 kDa, 83 kDa, 84 kDa, 85 kDa, 86 kDa, 87 kDa, 88 kDa, 89 kDa, 90 kDa, 91 kDa, 92 kDa, 93 kDa, 94 kDa, 95 kDa, 96 kDa, 97 kDa, 98 kDa, 99 kDa, 100 kDa, 101 kDa, 102 kDa, 103 kDa, 104 kDa, 105 kDa, 106 kDa, 107 kDa, 108 kDa, 109 kDa, 110 kDa, 111 kDa, 112 kDa, 113 kDa, 114 kDa, 115 kDa, 116 kDa, 117 kDa, 118 kDa, 119 kDa, 120 kDa, 121 kDa, 122 kDa, 123 kDa, 124 kDa, 125 kDa, 126 kDa, 127 kDa, 128 kDa, 129 kDa, 130 kDa, 131 kDa, 132 kDa, 133 kDa, 134 kDa, 135 kDa, 136 kDa, 137 kDa, 138 kDa, 139 kDa, or 140 kDa; from 79 kDa to: 80 kDa, 81 kDa, 82 kDa, 83 kDa, 84 kDa, 85 kDa, 86 kDa, 87 kDa, 88 kDa, 89 kDa, 90 kDa, 91 kDa, 92 kDa, 93 kDa, 94 kDa, 95 kDa, 96 kDa, 97 kDa, 98 kDa, 99 kDa, 100 kDa, 101 kDa, 102 kDa, 103 kDa, 104 kDa, 105 kDa, 106 kDa, 107 kDa, 108 kDa, 109 kDa, 110 kDa, 111 kDa, 112 kDa, 113 kDa, 114 kDa, 115 kDa, 116 kDa, 117 kDa, 118 kDa, 119 kDa, 120 kDa, 121 kDa, 122 kDa, 123 kDa, 124 kDa, 125 kDa, 126 kDa, 127 kDa, 128 kDa, 129 kDa, 130 kDa, 131 kDa, 132 kDa, 133 kDa, 134 kDa, 135 kDa, 136 kDa, 137 kDa, 138 kDa, 139 kDa, or 140 kDa; from 80 kDa to: 81 kDa, 82 kDa, 83 kDa, 84 kDa, 85 kDa, 86 kDa, 87 kDa, 88 kDa, 89 kDa, 90 kDa, 91 kDa, 92 kDa, 93 kDa, 94 kDa, 95 kDa, 96 kDa, 97 kDa, 98 kDa, 99 kDa, 100 kDa, 101 kDa, 102 kDa, 103 kDa, 104 kDa, 105 kDa, 106 kDa, 107 kDa, 108 kDa, 109 kDa, 110 kDa, 111 kDa, 112 kDa, 113 kDa, 114 kDa, 115 kDa, 116 kDa, 117 kDa, 118 kDa, 119 kDa, 120 kDa, 121 kDa, 122 kDa, 123 kDa, 124 kDa, 125 kDa, 126 kDa, 127 kDa, 128 kDa, 129 kDa, 130 kDa, 131 kDa, 132 kDa, 133 kDa, 134 kDa, 135 kDa, 136 kDa, 137 kDa, 138 kDa, 139 kDa, or 140 kDa; from 81 kDa to: 82 kDa, 83 kDa, 84 kDa, 85 kDa, 86 kDa, 87 kDa, 88 kDa, 89 kDa, 90 kDa, 91 kDa, 92 kDa, 93 kDa, 94 kDa, 95 kDa, 96 kDa, 97 kDa, 98 kDa, 99 kDa, 100 kDa, 101 kDa, 102 kDa, 103 kDa, 104 kDa, 105 kDa, 106 kDa, 107 kDa, 108 kDa, 109 kDa, 110 kDa, 111 kDa, 112 kDa, 113 kDa, 114 kDa, 115 kDa, 116 kDa, 117 kDa, 118 kDa, 119 kDa, 120 kDa, 121 kDa, 122 kDa, 123 kDa, 124 kDa, 125 kDa, 126 kDa, 127 kDa, 128 kDa, 129 kDa, 130 kDa, 131 kDa, 132 kDa, 133 kDa, 134 kDa, 135 kDa, 136 kDa, 137 kDa, 138 kDa, 139 kDa, or 140 kDa; from 82 kDa to: 83 kDa, 84 kDa, 85 kDa, 86 kDa, 87 kDa, 88 kDa, 89 kDa, 90 kDa, 91 kDa, 92 kDa, 93 kDa, 94 kDa, 95 kDa, 96 kDa, 97 kDa, 98 kDa, 99 kDa, 100 kDa, 101 kDa, 102 kDa, 103 kDa, 104 kDa, 105 kDa, 106 kDa, 107 kDa, 108 kDa, 109 kDa, 110 kDa, 111 kDa, 112 kDa, 113 kDa, 114 kDa, 115 kDa, 116 kDa, 117 kDa, 118 kDa, 119 kDa, 120 kDa, 121 kDa, 122 kDa, 123 kDa, 124 kDa, 125 kDa, 126 kDa, 127 kDa, 128 kDa, 129 kDa, 130 kDa, 131 kDa, 132 kDa, 133 kDa, 134 kDa, 135 kDa, 136 kDa, 137 kDa, 138 kDa, 139 kDa, or 140 kDa; from 83 kDa to: 84 kDa, 85 kDa, 86 kDa, 87 kDa, 88 kDa, 89 kDa, 90 kDa, 91 kDa, 92 kDa, 93 kDa, 94 kDa, 95 kDa, 96 kDa, 97 kDa, 98 kDa, 99 kDa, 100 kDa, 101 kDa, 102 kDa, 103 kDa, 104 kDa, 105 kDa, 106 kDa, 107 kDa, 108 kDa, 109 kDa, 110 kDa, 111 kDa, 112 kDa, 113 kDa, 114 kDa, 115 kDa, 116 kDa, 117 kDa, 118 kDa, 119 kDa, 120 kDa, 121 kDa, 122 kDa, 123 kDa, 124 kDa, 125 kDa, 126 kDa, 127 kDa, 128 kDa, 129 kDa, 130 kDa, 131 kDa, 132 kDa, 133 kDa, 134 kDa, 135 kDa, 136 kDa, 137 kDa, 138 kDa, 139 kDa, or 140 kDa; from 84 kDa to: 85 kDa, 86 kDa, 87 kDa, 88 kDa, 89 kDa, 90 kDa, 91 kDa, 92 kDa, 93 kDa, 94 kDa, 95 kDa, 96 kDa, 97 kDa, 98 kDa, 99 kDa, 100 kDa, 101 kDa, 102 kDa, 103 kDa, 104 kDa, 105 kDa, 106 kDa, 107 kDa, 108 kDa, 109 kDa, 110 kDa, 111 kDa, 112 kDa, 113 kDa, 114 kDa, 115 kDa, 116 kDa, 117 kDa, 118 kDa, 119 kDa, 120 kDa, 121 kDa, 122 kDa, 123 kDa, 124 kDa, 125 kDa, 126 kDa, 127 kDa, 128 kDa, 129 kDa, 130 kDa, 131 kDa, 132 kDa, 133 kDa, 134 kDa, 135 kDa, 136 kDa, 137 kDa, 138 kDa, 139 kDa, or 140 kDa; from 85 kDa to: 86 kDa, 87 kDa, 88 kDa, 89 kDa, 90 kDa, 91 kDa, 92 kDa, 93 kDa, 94 kDa, 95 kDa, 96 kDa, 97 kDa, 98 kDa, 99 kDa, 100 kDa, 101 kDa, 102 kDa, 103 kDa, 104 kDa, 105 kDa, 106 kDa, 107 kDa, 108 kDa, 109 kDa, 110 kDa, 111 kDa, 112 kDa, 113 kDa, 114 kDa, 115 kDa, 116 kDa, 117 kDa, 118 kDa, 119 kDa, 120 kDa, 121 kDa, 122 kDa, 123 kDa, 124 kDa, 125 kDa, 126 kDa, 127 kDa, 128 kDa, 129 kDa, 130 kDa, 131 kDa, 132 kDa, 133 kDa, 134 kDa, 135 kDa, 136 kDa, 137 kDa, 138 kDa, 139 kDa, or 140 kDa; from 86 kDa to: 87 kDa, 88 kDa, 89 kDa, 90 kDa, 91 kDa, 92 kDa, 93 kDa, 94 kDa, 95 kDa, 96 kDa, 97 kDa, 98 kDa, 99 kDa, 100 kDa, 101 kDa, 102 kDa, 103 kDa, 104 kDa, 105 kDa, 106 kDa, 107 kDa, 108 kDa, 109 kDa, 110 kDa, 111 kDa, 112 kDa, 113 kDa, 114 kDa, 115 kDa, 116 kDa, 117 kDa, 118 kDa, 119 kDa, 120 kDa, 121 kDa, 122 kDa, 123 kDa, 124 kDa, 125 kDa, 126 kDa, 127 kDa, 128 kDa, 129 kDa, 130 kDa, 131 kDa, 132 kDa, 133 kDa, 134 kDa, 135 kDa, 136 kDa, 137 kDa, 138 kDa, 139 kDa, or 140 kDa; from 87 kDa to: 88 kDa, 89 kDa, 90 kDa, 91 kDa, 92 kDa, 93 kDa, 94 kDa, 95 kDa, 96 kDa, 97 kDa, 98 kDa, 99 kDa, 100 kDa, 101 kDa, 102 kDa, 103 kDa, 104 kDa, 105 kDa, 106 kDa, 107 kDa, 108 kDa, 109 kDa, 110 kDa, 111 kDa, 112 kDa, 113 kDa, 114 kDa, 115 kDa, 116 kDa, 117 kDa, 118 kDa, 119 kDa, 120 kDa, 121 kDa, 122 kDa, 123 kDa, 124 kDa, 125 kDa, 126 kDa, 127 kDa, 128 kDa, 129 kDa, 130 kDa, 131 kDa, 132 kDa, 133 kDa, 134 kDa, 135 kDa, 136 kDa, 137 kDa, 138 kDa, 139 kDa, or 140 kDa; from 88 kDa to: 89 kDa, 90 kDa, 91 kDa, 92 kDa, 93 kDa, 94 kDa, 95 kDa, 96 kDa, 97 kDa, 98 kDa, 99 kDa, 100 kDa, 101 kDa, 102 kDa, 103 kDa, 104 kDa, 105 kDa, 106 kDa, 107 kDa, 108 kDa, 109 kDa, 110 kDa, 111 kDa, 112 kDa, 113 kDa, 114 kDa, 115 kDa, 116 kDa, 117 kDa, 118 kDa, 119 kDa, 120 kDa, 121 kDa, 122 kDa, 123 kDa, 124 kDa, 125 kDa, 126 kDa, 127 kDa, 128 kDa, 129 kDa, 130 kDa, 131 kDa, 132 kDa, 133 kDa, 134 kDa, 135 kDa, 136 kDa, 137 kDa, 138 kDa, 139 kDa, or 140 kDa; from 89 kDa to: 90 kDa, 91 kDa, 92 kDa, 93 kDa, 94 kDa, 95 kDa, 96 kDa, 97 kDa, 98 kDa, 99 kDa, 100 kDa, 101 kDa, 102 kDa, 103 kDa, 104 kDa, 105 kDa, 106 kDa, 107 kDa, 108 kDa, 109 kDa, 110 kDa, 111 kDa, 112 kDa, 113 kDa, 114 kDa, 115 kDa, 116 kDa, 117 kDa, 118 kDa, 119 kDa, 120 kDa, 121 kDa, 122 kDa, 123 kDa, 124 kDa, 125 kDa, 126 kDa, 127 kDa, 128 kDa, 129 kDa, 130 kDa, 131 kDa, 132 kDa, 133 kDa, 134 kDa, 135 kDa, 136 kDa, 137 kDa, 138 kDa, 139 kDa, or 140 kDa; from 90 kDa to: 91 kDa, 92 kDa, 93 kDa, 94 kDa, 95 kDa, 96 kDa, 97 kDa, 98 kDa, 99 kDa, 100 kDa, 101 kDa, 102 kDa, 103 kDa, 104 kDa, 105 kDa, 106 kDa, 107 kDa, 108 kDa, 109 kDa, 110 kDa, 111 kDa, 112 kDa, 113 kDa, 114 kDa, 115 kDa, 116 kDa, 117 kDa, 118 kDa, 119 kDa, 120 kDa, 121 kDa, 122 kDa, 123 kDa, 124 kDa, 125 kDa, 126 kDa, 127 kDa, 128 kDa, 129 kDa, 130 kDa, 131 kDa, 132 kDa, 133 kDa, 134 kDa, 135 kDa, 136 kDa, 137 kDa, 138 kDa, 139 kDa, or 140 kDa; from 91 kDa to: 92 kDa, 93 kDa, 94 kDa, 95 kDa, 96 kDa, 97 kDa, 98 kDa, 99 kDa, 100 kDa, 101 kDa, 102 kDa, 103 kDa, 104 kDa, 105 kDa, 106 kDa, 107 kDa, 108 kDa, 109 kDa, 110 kDa, 111 kDa, 112 kDa, 113 kDa, 114 kDa, 115 kDa, 116 kDa, 117 kDa, 118 kDa, 119 kDa, 120 kDa, 121 kDa, 122 kDa, 123 kDa, 124 kDa, 125 kDa, 126 kDa, 127 kDa, 128 kDa, 129 kDa, 130 kDa, 131 kDa, 132 kDa, 133 kDa, 134 kDa, 135 kDa, 136 kDa, 137 kDa, 138 kDa, 139 kDa, or 140 kDa; from 92 kDa to: 93 kDa, 94 kDa, 95 kDa, 96 kDa, 97 kDa, 98 kDa, 99 kDa, 100 kDa, 101 kDa, 102 kDa, 103 kDa, 104 kDa, 105 kDa, 106 kDa, 107 kDa, 108 kDa, 109 kDa, 110 kDa, 111 kDa, 112 kDa, 113 kDa, 114 kDa, 115 kDa, 116 kDa, 117 kDa, 118 kDa, 119 kDa, 120 kDa, 121 kDa, 122 kDa, 123 kDa, 124 kDa, 125 kDa, 126 kDa, 127 kDa, 128 kDa, 129 kDa, 130 kDa, 131 kDa, 132 kDa, 133 kDa, 134 kDa, 135 kDa, 136 kDa, 137 kDa, 138 kDa, 139 kDa, or 140 kDa; from 93 kDa to: 94 kDa, 95 kDa, 96 kDa, 97 kDa, 98 kDa, 99 kDa, 100 kDa, 101 kDa, 102 kDa, 103 kDa, 104 kDa, 105 kDa, 106 kDa, 107 kDa, 108 kDa, 109 kDa, 110 kDa, 111 kDa, 112 kDa, 113 kDa, 114 kDa, 115 kDa, 116 kDa, 117 kDa, 118 kDa, 119 kDa, 120 kDa, 121 kDa, 122 kDa, 123 kDa, 124 kDa, 125 kDa, 126 kDa, 127 kDa, 128 kDa, 129 kDa, 130 kDa, 131 kDa, 132 kDa, 133 kDa, 134 kDa, 135 kDa, 136 kDa, 137 kDa, 138 kDa, 139 kDa, or 140 kDa; from 94 kDa to: 95 kDa, 96 kDa, 97 kDa, 98 kDa, 99 kDa, 100 kDa, 101 kDa, 102 kDa, 103 kDa, 104 kDa, 105 kDa, 106 kDa, 107 kDa, 108 kDa, 109 kDa, 110 kDa, 111 kDa, 112 kDa, 113 kDa, 114 kDa, 115 kDa, 116 kDa, 117 kDa, 118 kDa, 119 kDa, 120 kDa, 121 kDa, 122 kDa, 123 kDa, 124 kDa, 125 kDa, 126 kDa, 127 kDa, 128 kDa, 129 kDa, 130 kDa, 131 kDa, 132 kDa, 133 kDa, 134 kDa, 135 kDa, 136 kDa, 137 kDa, 138 kDa, 139 kDa, or 140 kDa; from 95 kDa to: 96 kDa, 97 kDa, 98 kDa, 99 kDa, 100 kDa, 101 kDa, 102 kDa, 103 kDa, 104 kDa, 105 kDa, 106 kDa, 107 kDa, 108 kDa, 109 kDa, 110 kDa, 111 kDa, 112 kDa, 113 kDa, 114 kDa, 115 kDa, 116 kDa, 117 kDa, 118 kDa, 119 kDa, 120 kDa, 121 kDa, 122 kDa, 123 kDa, 124 kDa, 125 kDa, 126 kDa, 127 kDa, 128 kDa, 129 kDa, 130 kDa, 131 kDa, 132 kDa, 133 kDa, 134 kDa, 135 kDa, 136 kDa, 137 kDa, 138 kDa, 139 kDa, or 140 kDa; from 96 kDa to: 97 kDa, 98 kDa, 99 kDa, 100 kDa, 101 kDa, 102 kDa, 103 kDa, 104 kDa, 105 kDa, 106 kDa, 107 kDa, 108 kDa, 109 kDa, 110 kDa, 111 kDa, 112 kDa, 113 kDa, 114 kDa, 115 kDa, 116 kDa, 117 kDa, 118 kDa, 119 kDa, 120 kDa, 121 kDa, 122 kDa, 123 kDa, 124 kDa, 125 kDa, 126 kDa, 127 kDa, 128 kDa, 129 kDa, 130 kDa, 131 kDa, 132 kDa, 133 kDa, 134 kDa, 135 kDa, 136 kDa, 137 kDa, 138 kDa, 139 kDa, or 140 kDa; from 97 kDa to: 98 kDa, 99 kDa, 100 kDa, 101 kDa, 102 kDa, 103 kDa, 104 kDa, 105 kDa, 106 kDa, 107 kDa, 108 kDa, 109 kDa, 110 kDa, 111 kDa, 112 kDa, 113 kDa, 114 kDa, 115 kDa, 116 kDa, 117 kDa, 118 kDa, 119 kDa, 120 kDa, 121 kDa, 122 kDa, 123 kDa, 124 kDa, 125 kDa, 126 kDa, 127 kDa, 128 kDa, 129 kDa, 130 kDa, 131 kDa, 132 kDa, 133 kDa, 134 kDa, 135 kDa, 136 kDa, 137 kDa, 138 kDa, 139 kDa, or 140 kDa; from 98 kDa to: 99 kDa, 100 kDa, 101 kDa, 102 kDa, 103 kDa, 104 kDa, 105 kDa, 106 kDa, 107 kDa, 108 kDa, 109 kDa, 110 kDa, 111 kDa, 112 kDa, 113 kDa, 114 kDa, 115 kDa, 116 kDa, 117 kDa, 118 kDa, 119 kDa, 120 kDa, 121 kDa, 122 kDa, 123 kDa, 124 kDa, 125 kDa, 126 kDa, 127 kDa, 128 kDa, 129 kDa, 130 kDa, 131 kDa, 132 kDa, 133 kDa, 134 kDa, 135 kDa, 136 kDa, 137 kDa, 138 kDa, 139 kDa, or 140 kDa; from 99 kDa to: 100 kDa, 101 kDa, 102 kDa, 103 kDa, 104 kDa, 105 kDa, 106 kDa, 107 kDa, 108 kDa, 109 kDa, 110 kDa, 111 kDa, 112 kDa, 113 kDa, 114 kDa, 115 kDa, 116 kDa, 117 kDa, 118 kDa, 119 kDa, 120 kDa, 121 kDa, 122 kDa, 123 kDa, 124 kDa, 125 kDa, 126 kDa, 127 kDa, 128 kDa, 129 kDa, 130 kDa, 131 kDa, 132 kDa, 133 kDa, 134 kDa, 135 kDa, 136 kDa, 137 kDa, 138 kDa, 139 kDa, or 140 kDa; from 100 kDa to: 101 kDa, 102 kDa, 103 kDa, 104 kDa, 105 kDa, 106 kDa, 107 kDa, 108 kDa, 109 kDa, 110 kDa, 111 kDa, 112 kDa, 113 kDa, 114 kDa, 115 kDa, 116 kDa, 117 kDa, 118 kDa, 119 kDa, 120 kDa, 121 kDa, 122 kDa, 123 kDa, 124 kDa, 125 kDa, 126 kDa, 127 kDa, 128 kDa, 129 kDa, 130 kDa, 131 kDa, 132 kDa, 133 kDa, 134 kDa, 135 kDa, 136 kDa, 137 kDa, 138 kDa, 139 kDa, or 140 kDa; from 101 kDa to: 102 kDa, 103 kDa, 104 kDa, 105 kDa, 106 kDa, 107 kDa, 108 kDa, 109 kDa, 110 kDa, 111 kDa, 112 kDa, 113 kDa, 114 kDa, 115 kDa, 116 kDa, 117 kDa, 118 kDa, 119 kDa, 120 kDa, 121 kDa, 122 kDa, 123 kDa, 124 kDa, 125 kDa, 126 kDa, 127 kDa, 128 kDa, 129 kDa, 130 kDa, 131 kDa, 132 kDa, 133 kDa, 134 kDa, 135 kDa, 136 kDa, 137 kDa, 138 kDa, 139 kDa, or 140 kDa; from 102 kDa to: 103 kDa, 104 kDa, 105 kDa, 106 kDa, 107 kDa, 108 kDa, 109 kDa, 110 kDa, 111 kDa, 112 kDa, 113 kDa, 114 kDa, 115 kDa, 116 kDa, 117 kDa, 118 kDa, 119 kDa, 120 kDa, 121 kDa, 122 kDa, 123 kDa, 124 kDa, 125 kDa, 126 kDa, 127 kDa, 128 kDa, 129 kDa, 130 kDa, 131 kDa, 132 kDa, 133 kDa, 134 kDa, 135 kDa, 136 kDa, 137 kDa, 138 kDa, 139 kDa, or 140 kDa; from 103 kDa to: 104 kDa, 105 kDa, 106 kDa, 107 kDa, 108 kDa, 109 kDa, 110 kDa, 111 kDa, 112 kDa, 113 kDa, 114 kDa, 115 kDa, 116 kDa, 117 kDa, 118 kDa, 119 kDa, 120 kDa, 121 kDa, 122 kDa, 123 kDa, 124 kDa, 125 kDa, 126 kDa, 127 kDa, 128 kDa, 129 kDa, 130 kDa, 131 kDa, 132 kDa, 133 kDa, 134 kDa, 135 kDa, 136 kDa, 137 kDa, 138 kDa, 139 kDa, or 140 kDa; from 104 kDa to: 105 kDa, 106 kDa, 107 kDa, 108 kDa, 109 kDa, 110 kDa, 111 kDa, 112 kDa, 113 kDa, 114 kDa, 115 kDa, 116 kDa, 117 kDa, 118 kDa, 119 kDa, 120 kDa, 121 kDa, 122 kDa, 123 kDa, 124 kDa, 125 kDa, 126 kDa, 127 kDa, 128 kDa, 129 kDa, 130 kDa, 131 kDa, 132 kDa, 133 kDa, 134 kDa, 135 kDa, 136 kDa, 137 kDa, 138 kDa, 139 kDa, or 140 kDa; from 105 kDa to: 106 kDa, 107 kDa, 108 kDa, 109 kDa, 110 kDa, 111 kDa, 112 kDa, 113 kDa, 114 kDa, 115 kDa, 116 kDa, 117 kDa, 118 kDa, 119 kDa, 120 kDa, 121 kDa, 122 kDa, 123 kDa, 124 kDa, 125 kDa, 126 kDa, 127 kDa, 128 kDa, 129 kDa, 130 kDa, 131 kDa, 132 kDa, 133 kDa, 134 kDa, 135 kDa, 136 kDa, 137 kDa, 138 kDa, 139 kDa, or 140 kDa; from 106 kDa to: 107 kDa, 108 kDa, 109 kDa, 110 kDa, 111 kDa, 112 kDa, 113 kDa, 114 kDa, 115 kDa, 116 kDa, 117 kDa, 118 kDa, 119 kDa, 120 kDa, 121 kDa, 122 kDa, 123 kDa, 124 kDa, 125 kDa, 126 kDa, 127 kDa, 128 kDa, 129 kDa, 130 kDa, 131 kDa, 132 kDa, 133 kDa, 134 kDa, 135 kDa, 136 kDa, 137 kDa, 138 kDa, 139 kDa, or 140 kDa; from 107 kDa to: 108 kDa, 109 kDa, 110 kDa, 111 kDa, 112 kDa, 113 kDa, 114 kDa, 115 kDa, 116 kDa, 117 kDa, 118 kDa, 119 kDa, 120 kDa, 121 kDa, 122 kDa, 123 kDa, 124 kDa, 125 kDa, 126 kDa, 127 kDa, 128 kDa, 129 kDa, 130 kDa, 131 kDa, 132 kDa, 133 kDa, 134 kDa, 135 kDa, 136 kDa, 137 kDa, 138 kDa, 139 kDa, or 140 kDa; from 108 kDa to: 109 kDa, 110 kDa, 111 kDa, 112 kDa, 113 kDa, 114 kDa, 115 kDa, 116 kDa, 117 kDa, 118 kDa, 119 kDa, 120 kDa, 121 kDa, 122 kDa, 123 kDa, 124 kDa, 125 kDa, 126 kDa, 127 kDa, 128 kDa, 129 kDa, 130 kDa, 131 kDa, 132 kDa, 133 kDa, 134 kDa, 135 kDa, 136 kDa, 137 kDa, 138 kDa, 139 kDa, or 140 kDa; from 109 kDa to: 110 kDa, 111 kDa, 112 kDa, 113 kDa, 114 kDa, 115 kDa, 116 kDa, 117 kDa, 118 kDa, 119 kDa, 120 kDa, 121 kDa, 122 kDa, 123 kDa, 124 kDa, 125 kDa, 126 kDa, 127 kDa, 128 kDa, 129 kDa, 130 kDa, 131 kDa, 132 kDa, 133 kDa, 134 kDa, 135 kDa, 136 kDa, 137 kDa, 138 kDa, 139 kDa, or 140 kDa; from 110 kDa to: 111 kDa, 112 kDa, 113 kDa, 114 kDa, 115 kDa, 116 kDa, 117 kDa, 118 kDa, 119 kDa, 120 kDa, 121 kDa, 122 kDa, 123 kDa, 124 kDa, 125 kDa, 126 kDa, 127 kDa, 128 kDa, 129 kDa, 130 kDa, 131 kDa, 132 kDa, 133 kDa, 134 kDa, 135 kDa, 136 kDa, 137 kDa, 138 kDa, 139 kDa, or 140 kDa; from 111 kDa to: 112 kDa, 113 kDa, 114 kDa, 115 kDa, 116 kDa, 117 kDa, 118 kDa, 119 kDa, 120 kDa, 121 kDa, 122 kDa, 123 kDa, 124 kDa, 125 kDa, 126 kDa, 127 kDa, 128 kDa, 129 kDa, 130 kDa, 131 kDa, 132 kDa, 133 kDa, 134 kDa, 135 kDa, 136 kDa, 137 kDa, 138 kDa, 139 kDa, or 140 kDa; from 112 kDa to: 113 kDa, 114 kDa, 115 kDa, 116 kDa, 117 kDa, 118 kDa, 119 kDa, 120 kDa, 121 kDa, 122 kDa, 123 kDa, 124 kDa, 125 kDa, 126 kDa, 127 kDa, 128 kDa, 129 kDa, 130 kDa, 131 kDa, 132 kDa, 133 kDa, 134 kDa, 135 kDa, 136 kDa, 137 kDa, 138 kDa, 139 kDa, or 140 kDa; from 113 kDa to: 114 kDa, 115 kDa, 116 kDa, 117 kDa, 118 kDa, 119 kDa, 120 kDa, 121 kDa, 122 kDa, 123 kDa, 124 kDa, 125 kDa, 126 kDa, 127 kDa, 128 kDa, 129 kDa, 130 kDa, 131 kDa, 132 kDa, 133 kDa, 134 kDa, 135 kDa, 136 kDa, 137 kDa, 138 kDa, 139 kDa, or 140 kDa; from 114 kDa to: 115 kDa, 116 kDa, 117 kDa, 118 kDa, 119 kDa, 120 kDa, 121 kDa, 122 kDa, 123 kDa, 124 kDa, 125 kDa, 126 kDa, 127 kDa, 128 kDa, 129 kDa, 130 kDa, 131 kDa, 132 kDa, 133 kDa, 134 kDa, 135 kDa, 136 kDa, 137 kDa, 138 kDa, 139 kDa, or 140 kDa; or from 115 kDa to: 116 kDa, 117 kDa, 118 kDa, 119 kDa, 120 kDa, 121 kDa, 122 kDa, 123 kDa, 124 kDa, 125 kDa, 126 kDa, 127 kDa, 128 kDa, 129 kDa, 130 kDa, 131 kDa, 132 kDa, 133 kDa, 134 kDa, 135 kDa, 136 kDa, 137 kDa, 138 kDa, 139 kDa, or 140 kDa.

[0474] In some embodiments, the first increasing or purifying comprises, prior to the above-noted filtrations, passing the LNP/RNA mixture through an ion exchange solid-state support. In some embodiments, the ion exchange solid-state support comprises an anion exchange column or a cation exchange column.

[0475] In some embodiments, prior to the admixing of the recombinant RNA molecules and the lipids of the LNPs, the lipids of the LNP admixed with an organic solvent to obtain a concentrated stock (e.g. a stock lipid/organic solvent mixture). In some embodiments, the admixing is (e.g. the stock lipid/organic solvent mixture is stirred, rocked, vortexed, sonicated, or agitated at from 25° C. to 37° C.) for at least 5 min, 6 min, 7 min, 8 min, 9 min, 10 min, 11 min, 12 min, 13 min, 14 min, 15 min, 16 min, 17 min, 18 min, 19 min, 20 min, 25 min, 30 min, 35 min, or 40 min to form a homogeneous stock lipid/organic solvent mixture. In some embodiments, the admixing is (e.g. the stock lipid/organic solvent mixture is stirred, rocked, vortexed, sonicated, or agitated at from 25° C. to 37° C.) for no more than 10 min, 11 min, 12 min, 13 min, 14 min, 15 min, 16 min, 17 min, 18 min, 19 min, 20 min, 25 min, 30 min, 35 min, 40 min, 50 min, 1 hr, 1.1 hrs, 1.2 hrs, 1.3 hrs, 1.4 hrs, or 1.5 hrs to form a homogeneous stock lipid/organic solvent mixture. Taking the above-noted embodiments into account, it is contemplated and supported that any of the above-noted amounts of time “of at least” and amounts of time “of no more than” may be combined to provide an enclosed range (i.e. the stock lipid/organic solvent mixture is stirred, rocked, vortexed, sonicated, or agitated at from 25° C. to 37° C. for from 5 min to 19 min). In some embodiments, the admixing is (e.g. the stock lipid/organic solvent mixture is stirred, rocked, vortexed, sonicated, or agitated at from 25° C. to 37° C.): from 5 min to: 6 min, 7 min, 8 min, 9 min, 10 min, 11 min, 12 min, 13 min, 14 min, 15 min, 16 min, 17 min, 18 min, 19 min, 20 min, 25 min, 30 min, 35 min, 40 min, 50 min, 1 hr, 1.1 hrs, 1.2 hrs, 1.3 hrs, 1.4 hrs, or 1.5 hrs; from 6 min to: 7 min, 8 min, 9 min, 10 min, 11 min, 12 min, 13 min, 14 min, 15 min, 16 min, 17 min, 18 min, 19 min, 20 min, 25 min, 30 min, 35 min, 40 min, 50 min, 1 hr, 1.1 hrs, 1.2 hrs, 1.3 hrs, 1.4 hrs, or 1.5 hrs; from 7 min to: 8 min, 9 min, 10 min, 11 min, 12 min, 13 min, 14 min, 15 min, 16 min, 17 min, 18 min, 19 min, 20 min, 25 min, 30 min, 35 min, 40 min, 50 min, 1 hr, 1.1 hrs, 1.2 hrs, 1.3 hrs, 1.4 hrs, or 1.5 hrs; from 8 min to: 9 min, 10 min, 11 min, 12 min, 13 min, 14 min, 15 min, 16 min, 17 min, 18 min, 19 min, 20 min, 25 min, 30 min, 35 min, 40 min, 50 min, 1 hr, 1.1 hrs, 1.2 hrs, 1.3 hrs, 1.4 hrs, or 1.5 hrs; from 9 min to: 10 min, 11 min, 12 min, 13 min, 14 min, 15 min, 16 min, 17 min, 18 min, 19 min, 20 min, 25 min, 30 min, 35 min, 40 min, 50 min, 1 hr, 1.1 hrs, 1.2 hrs, 1.3 hrs, 1.4 hrs, or 1.5 hrs; from 10 min to: 11 min, 12 min, 13 min, 14 min, 15 min, 16 min, 17 min, 18 min, 19 min, 20 min, 25 min, 30 min, 35 min, 40 min, 50 min, 1 hr, 1.1 hrs, 1.2 hrs, 1.3 hrs, 1.4 hrs, or 1.5 hrs; from 11 min to: 12 min, 13 min, 14 min, 15 min, 16 min, 17 min, 18 min, 19 min, 20 min, 25 min, 30 min, 35 min, 40 min, 50 min, 1 hr, 1.1 hrs, 1.2 hrs, 1.3 hrs, 1.4 hrs, or 1.5 hrs; from 12 min to: 13 min, 14 min, 15 min, 16 min, 17 min, 18 min, 19 min, 20 min, 25 min, 30 min, 35 min, 40 min, 50 min, 1 hr, 1.1 hrs, 1.2 hrs, 1.3 hrs, 1.4 hrs, or 1.5 hrs; from 13 min to: 14 min, 15 min, 16 min, 17 min, 18 min, 19 min, 20 min, 25 min, 30 min, 35 min, 40 min, 50 min, 1 hr, 1.1 hrs, 1.2 hrs, 1.3 hrs, 1.4 hrs, or 1.5 hrs; from 14 min to: 15 min, 16 min, 17 min, 18 min, 19 min, 20 min, 25 min, 30 min, 35 min, 40 min, 50 min, 1 hr, 1.1 hrs, 1.2 hrs, 1.3 hrs, 1.4 hrs, or 1.5 hrs; from 15 min to: 16 min, 17 min, 18 min, 19 min, 20 min, 25 min, 30 min, 35 min, 40 min, 50 min, 1 hr, 1.1 hrs, 1.2 hrs, 1.3 hrs, 1.4 hrs, or 1.5 hrs; from 16 min to: 17 min, 18 min, 19 min, 20 min, 25 min, 30 min, 35 min, 40 min, 50 min, 1 hr, 1.1 hrs, 1.2 hrs, 1.3 hrs, 1.4 hrs, or 1.5 hrs; from 17 min to: 18 min, 19 min, 20 min, 25 min, 30 min, 35 min, 40 min, 50 min, 1 hr, 1.1 hrs, 1.2 hrs, 1.3 hrs, 1.4 hrs, or 1.5 hrs; from 18 min to: 19 min, 20 min, 25 min, 30 min, 35 min, 40 min, 50 min, 1 hr, 1.1 hrs, 1.2 hrs, 1.3 hrs, 1.4 hrs, or 1.5 hrs; from 19 min to: 20 min, 25 min, 30 min, 35 min, 40 min, 50 min, 1 hr, 1.1 hrs, 1.2 hrs, 1.3 hrs, 1.4 hrs, or 1.5 hrs; from 20 min to: 25 min, 30 min, 35 min, 40 min, 50 min, 1 hr, 1.1 hrs, 1.2 hrs, 1.3 hrs, 1.4 hrs, or 1.5 hrs; from 25 min to: 30 min, 35 min, 40 min, 50 min, 1 hr, 1.1 hrs, 1.2 hrs, 1.3 hrs, 1.4 hrs, or 1.5 hrs; from 30 min to: 35 min, 40 min, 50 min, 1 hr, 1.1 hrs, 1.2 hrs, 1.3 hrs, 1.4 hrs, or 1.5 hrs; from 35 min to: 35 min, 40 min, 50 min, 1 hr, 1.1 hrs, 1.2 hrs, 1.3 hrs, 1.4 hrs, or 1.5 hrs; from 40 min to: 50 min, 1 hr, 1.1 hrs, 1.2 hrs, 1.3 hrs, 1.4 hrs, or 1.5 hrs; from 50 min to: 1 hr, 1.1 hrs, 1.2 hrs, 1.3 hrs, 1.4 hrs, or 1.5 hrs; from 1 hr to: 1.1 hrs, 1.2 hrs, 1.3 hrs, 1.4 hrs, or 1.5 hrs; from 1.1 hrs to: 1.2 hrs, 1.3 hrs, 1.4 hrs, or 1.5 hrs; or from 1.2 hrs to: 1.3 hrs, 1.4 hrs, or 1.5 hrs to form a homogeneous stock lipid/organic solvent mixture. In some embodiments, the homogenous stock lipid/organic solvent mixture is further diluted in the organic solvent (i.e. ethanol) to obtain the second solution.

### Methods of Administering the RNA

[0476] In one aspect, a method of eliciting an immune response in a subject to an immunogen is provided, wherein the method comprises administering to the subject an effective amount of the recombinant RNA molecules or the formulation. In some embodiments, the immune response is a protective immune response. In some embodiments, the immune response or the protective immune response comprises a cell-mediated immune response, an antibody-response (e.g. humoral immune response), a T_{H1} immune response, or a T_{H2} immune response. In some embodiments, the immune response is a therapeutic immune response. In some embodiments, the heterologous polypeptide comprises the antibody against the immunogen. In some embodiments, the heterologous polypeptide comprises the immunogen.

[0477] In another aspect, a method of delivering to a subject a heterologous nucleic acid in the recombinant RNA or a formulation comprising the recombinant RNA is provided, wherein the method comprises administering an effective amount of the recombinant RNA.

[0478] In some embodiments, the subject is human. In some embodiments, the subject is a mammal, such as a human or a large veterinary mammal (e.g. horses, cattle, deer, goats, pigs). Where the formulation or recombinant RNA is for eliciting a protective immune response, the subject is preferably a human, such as a child (e.g. a toddler or infant), a teenager, and the recombinant RNA or the formulation comprising the recombinant RNA is formulated as a vaccine. Where the composition or recombinant RNA is used as a treatment or for therapeutic use, the human is preferably a teenager or an adult. A vaccine intended for children may also be administered to adults, with the provisio that the amount of recombinant RNA or formulation comprising the recombinant RNA may be scaled up to provide an effective amount consistent with the state of the immune system of the subject (i.e. the elderly having more difficulty eliciting certain immune responses) and the average body weight of a subject of that age or the actual body weight of the subject.

[0479] In some embodiments, the recombinant RNA or formulation comprising the recombinant RNA is administered to the subject intramuscularly, intradermally, subcutaneously, transcutaneously, topically, intraperitoneally, intrathecally, pulmonarily (i.e. inhaled), intracerebroventricularly, intravenously, intra-arterially, onto a mucosa (i.e. vaginally), buccally, sublingually, intranasally, optically, to the cornea, or into the eyeball.

[0480] In some embodiments, a method for treating cancer in a subject is provided, the subject having a tumor of the cancer, the method comprising administering to the subject the formulation comprising the recombinant RNA or the recombinant RNA or an effective amount thereof. In some embodiments, the recombinant RNA comprises a sequence that encodes a heterologous polypeptide comprising a polyepitopic peptide comprising two or more immunogenic neo-epitopes and a linker, the linker linking the two or more immunogenic neo-epitopes, the immunogenic neo-epitopes being from a first sample comprising cells from the tumor from the subject, each neo-epitope being: (a) encoded in mRNA in the first sample, (b) occurring in a protein-coding region therein, (c) being predicted to bind to a major histocompatibility complex, and (d) being capable of introducing a difference in the amino acid sequence of the neo-epitope when compared to a reference amino acid sequence or genetic sequence predicted to encode the reference amino acid sequence obtained from a second sample from a non-cancerous cell from the subject. In some embodiments, the recombinant RNA is produced from a method comprising: obtaining a first nucleic acid sequence from the first sample, obtaining a second nucleic acid sequence from the second sample, comparing the first nucleic acid sequence to the second nucleic acid sequence thereby obtaining at least two somatic mutations present in the tumor cells, identifying from the at least two somatic mutations (a)-(d), and producing the recombinant RNA.

[0481] In one aspect, a method for treating cancer in a subject is provided, the method comprising administering to the subject the recombinant RNA, a formulation comprising the recombinant RNA, or an effective amount thereof, wherein the recombinant RNA comprises a sequence encoding a heterologous polypeptide comprising IL-12 sc, IL-15sushi, IFNα, or GM-CSF. In some embodiments, the method further comprises administering an anti-PD-1/PD-L1 checkpoint inhibitor. In some embodiments, the cancer is melanoma, head and neck squamous cell cancer (HNSCC), cutaneous squamous cell carcinoma (CSCC), or advanced anti-PD-1/PD-L1 naïve cancers thereof.

[0482] In some embodiments, a method for treating cancer in a subject is provided, the method comprising administering to the subject the recombinant RNA, a formulation comprising the recombinant RNA, or an effective amount thereof. In some embodiments, the recombinant RNA comprises a sequence encoding a heterologous polypeptide comprising autogene, cevumeran, or atezolizumag. In some embodiments, the cancer is melanoma, head and neck squamous cell cancer (HNSCC), cutaneous squamous cell carcinoma (CSCC), non-small cell lung cancer (NSCLC), or advanced anti-PD-1/PD-L1 naïve cancers thereof.

[0483] In some embodiments, the effective amount comprises or is at least: 0.1 μg, 1 μg, 2 μg, 3 μg, 4 μg, 5 μg, 6 μg, 7 μg, 8 μg, 9 μg, 10 μg, 11 μg, 12 μg, 13 μg, 14 μg, 15 μg, 16 μg, 17 μg, 18 μg, 19 μg, 20 μg, 21 μg, 22 μg, 23 μg, 24 μg, 25 μg, 26 μg, 27 μg, 28 μg, 29 μg, 30 μg, 31 μg, 32 μg, 33 μg, 34 μg, 35 μg, 36 μg, 37 μg, 38 μg, 39 μg, 40 μg, 41 μg, 42 μg, 43 μg, 44 μg, 45 μg, 46 μg, 47 μg, 48 μg, 49 μg, 50 μg, 51 μg, 52 μg, 53 μg, 54 μg, 55 μg, 56 μg, 57 μg, 58 μg, 59 μg, 60 μg, 61 μg, 62 μg, 63 μg, 64 μg, 65 μg, 66 μg, 67 μg, 68 μg, 69 μg, 70 μg, 71 μg, 72 μg, 73 μg, 74 μg, 75 μg, 76 μg, 77 μg, 78 μg, 79 μg, 80 μg, 81 μg, 82 μg, 83 μg, 84 μg, 85 μg, 86 μg, 87 μg, 88 μg, 89 μg, 90 μg, 91 μg, 92 μg, 93 μg, 94 μg, 95 μg, 96 μg, 97 μg, 98 μg, 99 μg, 100 μg, 101 μg, 102 μg, 103 μg, 104 μg, 105 μg, 106 μg, 107 μg, 108 μg, 109 μg, 110 μg, 111 μg, 112 μg, 113 μg, 114 μg, 115 μg, 116 μg, 117 μg, 118 μg, 119 μg, or 120 μg of recombinant RNA molecules per administration. In some embodiments, the effective amount comprises or is no more than: 120 μg, 119 μg, 118 μg, 117 μg, 116 μg, 115 μg, 114 μg, 113 μg, 112 μg, 111 μg, 110 μg, 109 μg, 108 μg, 107 μg, 106 μg, 105 μg, 104 μg, 103 μg, 102 μg, 101 μg, 100 μg, 99 μg, 98 μg, 97 μg, 96 μg, 95 μg, 94 μg, 93 μg, 92 μg, 91 μg, 90 μg, 89 μg, 88 μg, 87 μg, 86 μg, 85 μg, 84 μg, 83 μg, 82 μg, 81 μg, 80 μg, 79 μg, 78 μg, 77 μg, 76 μg, 75 μg, 74 μg, 73 μg, 72 μg, 71 μg, 70 μg, 69 μg, 68 μg, 67 μg, 66 μg, 65 μg, 64 μg, 63 μg, 62 μg, 61 μg, 60 μg, 59 μg, 58 μg, 57 μg, 56 μg, 55 μg, 54 μg, 53 μg, 52 μg, 51 μg, 50 μg, 49 μg, 48 μg, 47 μg, 46 μg, 45 μg, 44 μg, 43 μg, 42 μg, 41 μg, 40 μg, 39 μg, 38 μg, 37 μg, 36 μg, 35 μg, 34 μg, 33 μg, 32 μg, 31 μg, 30 μg, 29 μg, 28 μg, 27 μg, 26 μg, 25 μg, 24 μg, 23 μg, 22 μg, 21 μg, 20 μg, 19 μg, 18 μg, 17 μg, 16 μg, or 15 μg of recombinant RNA molecules per administration. Taking the above-noted embodiments into account, it is contemplated and supported that any of the above-noted “pg” of “at least” and any of the above-noted “pg” of “no more than” may be combined to provide an enclosed range (i.e. the effective amount comprises or is from 25 μg to 75 μg of recombinant RNA molecules per administration). In some embodiments, the effective amount comprises or is from 1 μg to: 2 μg, 3 μg, 4 μg, 5 μg, 6 μg, 7 μg, 8 μg, 9 μg, 10 μg, 11 μg, 12 μg, 13 μg, 14 μg, 15 μg, 16 μg, 17 μg, 18 μg, 19 μg, 20 μg, 21 μg, 22 μg, 23 μg, 24 μg, 25 μg, 26 μg, 27 μg, 28 μg, 29 μg, 30 μg, 31 μg, 32 μg, 33 μg, 34 μg, 35 μg, 36 μg, 37 μg, 38 μg, 39 μg, 40 μg, 41 μg, 42 μg, 43 μg, 44 μg, 45 μg, 46 μg, 47 μg, 48 μg, 49 μg, 50 μg, 51 μg, 52 μg, 53 μg, 54 μg, 55 μg, 56 μg, 57 μg, 58 μg, 59 μg, 60 μg, 61 μg, 62 μg, 63 μg, 64 μg, 65 μg, 66 μg, 67 μg, 68 μg, 69 μg, 70 μg, 71 μg, 72 μg, 73 μg, 74 μg, 75 μg, 76 μg, 77 μg, 78 μg, 79 μg, 80 μg, 81 μg, 82 μg, 83 μg, 84 μg, 85 μg, 86 μg, 87 μg, 88 μg, 89 μg, 90 μg, 91 μg, 92 μg, 93 μg, 94 μg, 95 μg, 96 μg, 97 μg, 98 μg, 99 μg, 100 μg, 101 μg, 102 μg, 103 μg, 104 μg, 105 μg, 106 μg, 107 μg, 108 μg, 109 μg, 110 μg, 111 μg, 112 μg, 113 μg, 114 μg, 115 μg, 116 μg, 117 μg, 118 μg, 119 μg, or 120 μg; from 2 μg to: 3 μg, 4 μg, 5 μg, 6 μg, 7 μg, 8 μg, 9 μg, 10 μg, 11 μg, 12 μg, 13 μg, 14 μg, 15 μg, 16 μg, 17 μg, 18 μg, 19 μg, 20 μg, 21 μg, 22 μg, 23 μg, 24 μg, 25 μg, 26 μg, 27 μg, 28 μg, 29 μg, 30 μg, 31 μg, 32 μg, 33 μg, 34 μg, 35 μg, 36 μg, 37 μg, 38 μg, 39 μg, 40 μg, 41 μg, 42 μg, 43 μg, 44 μg, 45 μg, 46 μg, 47 μg, 48 μg, 49 μg, 50 μg, 51 μg, 52 μg, 53 μg, 54 μg, 55 μg, 56 μg, 57 μg, 58 μg, 59 μg, 60 μg, 61 μg, 62 μg, 63 μg, 64 μg, 65 μg, 66 μg, 67 μg, 68 μg, 69 μg, 70 μg, 71 μg, 72 μg, 73 μg, 74 μg, 75 μg, 76 μg, 77 μg, 78 μg, 79 μg, 80 μg, 81 μg, 82 μg, 83 μg, 84 μg, 85 μg, 86 μg, 87 μg, 88 μg, 89 μg, 90 μg, 91 μg, 92 μg, 93 μg, 94 μg, 95 μg, 96 μg, 97 μg, 98 μg, 99 μg, 100 μg, 101 μg, 102 μg, 103 μg, 104 μg, 105 μg, 106 μg, 107 μg, 108 μg, 109 μg, 110 μg, 111 μg, 112 μg, 113 μg, 114 μg, 115 μg, 116 μg, 117 μg, 118 μg, 119 μg, or 120 μg; from 3 μg to: 4 μg, 5 μg, 6 μg, 7 μg, 8 μg, 9 μg, 10 μg, 11 μg, 12 μg, 13 μg, 14 μg, 15 μg, 16 μg, 17 μg, 18 μg, 19 μg, 20 μg, 21 μg, 22 μg, 23 μg, 24 μg, 25 μg, 26 μg, 27 μg, 28 μg, 29 μg, 30 μg, 31 μg, 32 μg, 33 μg, 34 μg, 35 μg, 36 μg, 37 μg, 38 μg, 39 μg, 40 μg, 41 μg, 42 μg, 43 μg, 44 μg, 45 μg, 46 μg, 47 μg, 48 μg, 49 μg, 50 μg, 51 μg, 52 μg, 53 μg, 54 μg, 55 μg, 56 μg, 57 μg, 58 μg, 59 μg, 60 μg, 61 μg, 62 μg, 63 μg, 64 μg, 65 μg, 66 μg, 67 μg, 68 μg, 69 μg, 70 μg, 71 μg, 72 μg, 73 μg, 74 μg, 75 μg, 76 μg, 77 μg, 78 μg, 79 μg, 80 μg, 81 μg, 82 μg, 83 μg, 84 μg, 85 μg, 86 μg, 87 μg, 88 μg, 89 μg, 90 μg, 91 μg, 92 μg, 93 μg, 94 μg, 95 μg, 96 μg, 97 μg, 98 μg, 99 μg, 100 μg, 101 μg, 102 μg, 103 μg, 104 μg, 105 μg, 106 μg, 107 μg, 108 μg, 109 μg, 110 μg, 111 μg, 112 μg, 113 μg, 114 μg, 115 μg, 116 μg, 117 μg, 118 μg, 119 μg, or 120 μg; from 4 μg to: 5 μg, 6 μg, 7 μg, 8 μg, 9 μg, 10 μg, 11 μg, 12 μg, 13 μg, 14 μg, 15 μg, 16 μg, 17 μg, 18 μg, 19 μg, 20 μg, 21 μg, 22 μg, 23 μg, 24 μg, 25 μg, 26 μg, 27 μg, 28 μg, 29 μg, 30 μg, 31 μg, 32 μg, 33 μg, 34 μg, 35 μg, 36 μg, 37 μg, 38 μg, 39 μg, 40 μg, 41 μg, 42 μg, 43 μg, 44 μg, 45 μg, 46 μg, 47 μg, 48 μg, 49 μg, 50 μg, 51 μg, 52 μg, 53 μg, 54 μg, 55 μg, 56 μg, 57 μg, 58 μg, 59 μg, 60 μg, 61 μg, 62 μg, 63 μg, 64 μg, 65 μg, 66 μg, 67 μg, 68 μg, 69 μg, 70 μg, 71 μg, 72 μg, 73 μg, 74 μg, 75 μg, 76 μg, 77 μg, 78 μg, 79 μg, 80 μg, 81 μg, 82 μg, 83 μg, 84 μg, 85 μg, 86 μg, 87 μg, 88 μg, 89 μg, 90 μg, 91 μg, 92 μg, 93 μg, 94 μg, 95 μg, 96 μg, 97 μg, 98 μg, 99 μg, 100 μg, 101 μg, 102 μg, 103 μg, 104 μg, 105 μg, 106 μg, 107 μg, 108 μg, 109 μg, 110 μg, 111 μg, 112 μg, 113 μg, 114 μg, 115 μg, 116 μg, 117 μg, 118 μg, 119 μg, or 120 μg; from 5 μg to: 6 μg, 7 μg, 8 μg, 9 μg, 10 μg, 11 μg, 12 μg, 13 μg, 14 μg, 15 μg, 16 μg, 17 μg, 18 μg, 19 μg, 20 μg, 21 μg, 22 μg, 23 μg, 24 μg, 25 μg, 26 μg, 27 μg, 28 μg, 29 μg, 30 μg, 31 μg, 32 μg, 33 μg, 34 μg, 35 μg, 36 μg, 37 μg, 38 μg, 39 μg, 40 μg, 41 μg, 42 μg, 43 μg, 44 μg, 45 μg, 46 μg, 47 μg, 48 μg, 49 μg, 50 μg, 51 μg, 52 μg, 53 μg, 54 μg, 55 μg, 56 μg, 57 μg, 58 μg, 59 μg, 60 μg, 61 μg, 62 μg, 63 μg, 64 μg, 65 μg, 66 μg, 67 μg, 68 μg, 69 μg, 70 μg, 71 μg, 72 μg, 73 μg, 74 μg, 75 μg, 76 μg, 77 μg, 78 μg, 79 μg, 80 μg, 81 μg, 82 μg, 83 μg, 84 μg, 85 μg, 86 μg, 87 μg, 88 μg, 89 μg, 90 μg, 91 μg, 92 μg, 93 μg, 94 μg, 95 μg, 96 μg, 97 μg, 98 μg, 99 μg, 100 μg, 101 μg, 102 μg, 103 μg, 104 μg, 105 μg, 106 μg, 107 μg, 108 μg, 109 μg, 110 μg, 111 μg, 112 μg, 113 μg, 114 μg, 115 μg, 116 μg, 117 μg, 118 μg, 119 μg, or 120 μg; from 6 μg to: 7 μg, 8 μg, 9 μg, 10 μg, 11 μg, 12 μg, 13 μg, 14 μg, 15 μg, 16 μg, 17 μg, 18 μg, 19 μg, 20 μg, 21 μg, 22 μg, 23 μg, 24 μg, 25 μg, 26 μg, 27 μg, 28 μg, 29 μg, 30 μg, 31 μg, 32 μg, 33 μg, 34 μg, 35 μg, 36 μg, 37 μg, 38 μg, 39 μg, 40 μg, 41 μg, 42 μg, 43 μg, 44 μg, 45 μg, 46 μg, 47 μg, 48 μg, 49 μg, 50 μg, 51 μg, 52 μg, 53 μg, 54 μg, 55 μg, 56 μg, 57 μg, 58 μg, 59 μg, 60 μg, 61 μg, 62 μg, 63 μg, 64 μg, 65 μg, 66 μg, 67 μg, 68 μg, 69 μg, 70 μg, 71 μg, 72 μg, 73 μg, 74 μg, 75 μg, 76 μg, 77 μg, 78 μg, 79 μg, 80 μg, 81 μg, 82 μg, 83 μg, 84 μg, 85 μg, 86 μg, 87 μg, 88 μg, 89 μg, 90 μg, 91 μg, 92 μg, 93 μg, 94 μg, 95 μg, 96 μg, 97 μg, 98 μg, 99 μg, 100 μg, 101 μg, 102 μg, 103 μg, 104 μg, 105 μg, 106 μg, 107 μg, 108 μg, 109 μg, 110 μg, 111 μg, 112 μg, 113 μg, 114 μg, 115 μg, 116 μg, 117 μg, 118 μg, 119 μg, or 120 μg; from 8 μg to: 9 μg, 10 μg, 11 μg, 12 μg, 13 μg, 14 μg, 15 μg, 16 μg, 17 μg, 18 μg, 19 μg, 20 μg, 21 μg, 22 μg, 23 μg, 24 μg, 25 μg, 26 μg, 27 μg, 28 μg, 29 μg, 30 μg, 31 μg, 32 μg, 33 μg, 34 μg, 35 μg, 36 μg, 37 μg, 38 μg, 39 μg, 40 μg, 41 μg, 42 μg, 43 μg, 44 μg, 45 μg, 46 μg, 47 μg, 48 μg, 49 μg, 50 μg, 51 μg, 52 μg, 53 μg, 54 μg, 55 μg, 56 μg, 57 μg, 58 μg, 59 μg, 60 μg, 61 μg, 62 μg, 63 μg, 64 μg, 65 μg, 66 μg, 67 μg, 68 μg, 69 μg, 70 μg, 71 μg, 72 μg, 73 μg, 74 μg, 75 μg, 76 μg, 77 μg, 78 μg, 79 μg, 80 μg, 81 μg, 82 μg, 83 μg, 84 μg, 85 μg, 86 μg, 87 μg, 88 μg, 89 μg, 90 μg, 91 μg, 92 μg, 93 μg, 94 μg, 95 μg, 96 μg, 97 μg, 98 μg, 99 μg, 100 μg, 101 μg, 102 μg, 103 μg, 104 μg, 105 μg, 106 μg, 107 μg, 108 μg, 109 μg, 110 μg, 111 μg, 112 μg, 113 μg, 114 μg, 115 μg, 116 μg, 117 μg, 118 μg, 119 μg, or 120 μg; from 9 μg to: 10 μg, 11 μg, 12 μg, 13 μg, 14 μg, 15 μg, 16 μg, 17 μg, 18 μg, 19 μg, 20 μg, 21 μg, 22 μg, 23 μg, 24 μg, 25 μg, 26 μg, 27 μg, 28 μg, 29 μg, 30 μg, 31 μg, 32 μg, 33 μg, 34 μg, 35 μg, 36 μg, 37 μg, 38 μg, 39 μg, 40 μg, 41 μg, 42 μg, 43 μg, 44 μg, 45 μg, 46 μg, 47 μg, 48 μg, 49 μg, 50 μg, 51 μg, 52 μg, 53 μg, 54 μg, 55 μg, 56 μg, 57 μg, 58 μg, 59 μg, 60 μg, 61 μg, 62 μg, 63 μg, 64 μg, 65 μg, 66 μg, 67 μg, 68 μg, 69 μg, 70 μg, 71 μg, 72 μg, 73 μg, 74 μg, 75 μg, 76 μg, 77 μg, 78 μg, 79 μg, 80 μg, 81 μg, 82 μg, 83 μg, 84 μg, 85 μg, 86 μg, 87 μg, 88 μg, 89 μg, 90 μg, 91 μg, 92 μg, 93 μg, 94 μg, 95 μg, 96 μg, 97 μg, 98 μg, 99 μg, 100 μg, 101 μg, 102 μg, 103 μg, 104 μg, 105 μg, 106 μg, 107 μg, 108 μg, 109 μg, 110 μg, 111 μg, 112 μg, 113 μg, 114 μg, 115 μg, 116 μg, 117 μg, 118 μg, 119 μg, or 120 μg; from 10 μg to: 11 μg, 12 μg, 13 μg, 14 μg, 15 μg, 16 μg, 17 μg, 18 μg, 19 μg, 20 μg, 21 μg, 22 μg, 23 μg, 24 μg, 25 μg, 26 μg, 27 μg, 28 μg, 29 μg, 30 μg, 31 μg, 32 μg, 33 μg, 34 μg, 35 μg, 36 μg, 37 μg, 38 μg, 39 μg, 40 μg, 41 μg, 42 μg, 43 μg, 44 μg, 45 μg, 46 μg, 47 μg, 48 μg, 49 μg, 50 μg, 51 μg, 52 μg, 53 μg, 54 μg, 55 μg, 56 μg, 57 μg, 58 μg, 59 μg, 60 μg, 61 μg, 62 μg, 63 μg, 64 μg, 65 μg, 66 μg, 67 μg, 68 μg, 69 μg, 70 μg, 71 μg, 72 μg, 73 μg, 74 μg, 75 μg, 76 μg, 77 μg, 78 μg, 79 μg, 80 μg, 81 μg, 82 μg, 83 μg, 84 μg, 85 μg, 86 μg, 87 μg, 88 μg, 89 μg, 90 μg, 91 μg, 92 μg, 93 μg, 94 μg, 95 μg, 96 μg, 97 μg, 98 μg, 99 μg, 100 μg, 101 μg, 102 μg, 103 μg, 104 μg, 105 μg, 106 μg, 107 μg, 108 μg, 109 μg, 110 μg, 111 μg, 112 μg, 113 μg, 114 μg, 115 μg, 116 μg, 117 μg, 118 μg, 119 μg, or 120 μg; from 11 μg to: 12 μg, 13 μg, 14 μg, 15 μg, 16 μg, 17 μg, 18 μg, 19 μg, 20 μg, 21 μg, 22 μg, 23 μg, 24 μg, 25 μg, 26 μg, 27 μg, 28 μg, 29 μg, 30 μg, 31 μg, 32 μg, 33 μg, 34 μg, 35 μg, 36 μg, 37 μg, 38 μg, 39 μg, 40 μg, 41 μg, 42 μg, 43 μg, 44 μg, 45 μg, 46 μg, 47 μg, 48 μg, 49 μg, 50 μg, 51 μg, 52 μg, 53 μg, 54 μg, 55 μg, 56 μg, 57 μg, 58 μg, 59 μg, 60 μg, 61 μg, 62 μg, 63 μg, 64 μg, 65 μg, 66 μg, 67 μg, 68 μg, 69 μg, 70 μg, 71 μg, 72 μg, 73 μg, 74 μg, 75 μg, 76 μg, 77 μg, 78 μg, 79 μg, 80 μg, 81 μg, 82 μg, 83 μg, 84 μg, 85 μg, 86 μg, 87 μg, 88 μg, 89 μg, 90 μg, 91 μg, 92 μg, 93 μg, 94 μg, 95 μg, 96 μg, 97 μg, 98 μg, 99 μg, 100 μg, 101 μg, 102 μg, 103 μg, 104 μg, 105 μg, 106 μg, 107 μg, 108 μg, 109 μg, 110 μg, 111 μg, 112 μg, 113 μg, 114 μg, 115 μg, 116 μg, 117 μg, 118 μg, 119 μg, or 120 μg; from 12 μg to: 13 μg, 14 μg, 15 μg, 16 μg, 17 μg, 18 μg, 19 μg, 20 μg, 21 μg, 22 μg, 23 μg, 24 μg, 25 μg, 26 μg, 27 μg, 28 μg, 29 μg, 30 μg, 31 μg, 32 μg, 33 μg, 34 μg, 35 μg, 36 μg, 37 μg, 38 μg, 39 μg, 40 μg, 41 μg, 42 μg, 43 μg, 44 μg, 45 μg, 46 μg, 47 μg, 48 μg, 49 μg, 50 μg, 51 μg, 52 μg, 53 μg, 54 μg, 55 μg, 56 μg, 57 μg, 58 μg, 59 μg, 60 μg, 61 μg, 62 μg, 63 μg, 64 μg, 65 μg, 66 μg, 67 μg, 68 μg, 69 μg, 70 μg, 71 μg, 72 μg, 73 μg, 74 μg, 75 μg, 76 μg, 77 μg, 78 μg, 79 μg, 80 μg, 81 μg, 82 μg, 83 μg, 84 μg, 85 μg, 86 μg, 87 μg, 88 μg, 89 μg, 90 μg, 91 μg, 92 μg, 93 μg, 94 μg, 95 μg, 96 μg, 97 μg, 98 μg, 99 μg, 100 μg, 101 μg, 102 μg, 103 μg, 104 μg, 105 μg, 106 μg, 107 μg, 108 μg, 109 μg, 110 μg, 111 μg, 112 μg, 113 μg, 114 μg, 115 μg, 116 μg, 117 μg, 118 μg, 119 μg, or 120 μg; from 13 μg to: 14 μg, 15 μg, 16 μg, 17 μg, 18 μg, 19 μg, 20 μg, 21 μg, 22 μg, 23 μg, 24 μg, 25 μg, 26 μg, 27 μg, 28 μg, 29 μg, 30 μg, 31 μg, 32 μg, 33 μg, 34 μg, 35 μg, 36 μg, 37 μg, 38 μg, 39 μg, 40 μg, 41 μg, 42 μg, 43 μg, 44 μg, 45 μg, 46 μg, 47 μg, 48 μg, 49 μg, 50 μg, 51 μg, 52 μg, 53 μg, 54 μg, 55 μg, 56 μg, 57 μg, 58 μg, 59 μg, 60 μg, 61 μg, 62 μg, 63 μg, 64 μg, 65 μg, 66 μg, 67 μg, 68 μg, 69 μg, 70 μg, 71 μg, 72 μg, 73 μg, 74 μg, 75 μg, 76 μg, 77 μg, 78 μg, 79 μg, 80 μg, 81 μg, 82 μg, 83 μg, 84 μg, 85 μg, 86 μg, 87 μg, 88 μg, 89 μg, 90 μg, 91 μg, 92 μg, 93 μg, 94 μg, 95 μg, 96 μg, 97 μg, 98 μg, 99 μg, 100 μg, 101 μg, 102 μg, 103 μg, 104 μg, 105 μg, 106 μg, 107 μg, 108 μg, 109 μg, 110 μg, 111 μg, 112 μg, 113 μg, 114 μg, 115 μg, 116 μg, 117 μg, 118 μg, 119 μg, or 120 μg; from 14 μg to: 15 μg, 16 μg, 17 μg, 18 μg, 19 μg, 20 μg, 21 μg, 22 μg, 23 μg, 24 μg, 25 μg, 26 μg, 27 μg, 28 μg, 29 μg, 30 μg, 31 μg, 32 μg, 33 μg, 34 μg, 35 μg, 36 μg, 37 μg, 38 μg, 39 μg, 40 μg, 41 μg, 42 μg, 43 μg, 44 μg, 45 μg, 46 μg, 47 μg, 48 μg, 49 μg, 50 μg, 51 μg, 52 μg, 53 μg, 54 μg, 55 μg, 56 μg, 57 μg, 58 μg, 59 μg, 60 μg, 61 μg, 62 μg, 63 μg, 64 μg, 65 μg, 66 μg, 67 μg, 68 μg, 69 μg, 70 μg, 71 μg, 72 μg, 73 μg, 74 μg, 75 μg, 76 μg, 77 μg, 78 μg, 79 μg, 80 μg, 81 μg, 82 μg, 83 μg, 84 μg, 85 μg, 86 μg, 87 μg, 88 μg, 89 μg, 90 μg, 91 μg, 92 μg, 93 μg, 94 μg, 95 μg, 96 μg, 97 μg, 98 μg, 99 μg, 100 μg, 101 μg, 102 μg, 103 μg, 104 μg, 105 μg, 106 μg, 107 μg, 108 μg, 109 μg, 110 μg, 111 μg, 112 μg, 113 μg, 114 μg, 115 μg, 116 μg, 117 μg, 118 μg, 119 μg, or 120 μg; from 15 μg to: 16 μg, 17 μg, 18 μg, 19 μg, 20 μg, 21 μg, 22 μg, 23 μg, 24 μg, 25 μg, 26 μg, 27 μg, 28 μg, 29 μg, 30 μg, 31 μg, 32 μg, 33 μg, 34 μg, 35 μg, 36 μg, 37 μg, 38 μg, 39 μg, 40 μg, 41 μg, 42 μg, 43 μg, 44 μg, 45 μg, 46 μg, 47 μg, 48 μg, 49 μg, 50 μg, 51 μg, 52 μg, 53 μg, 54 μg, 55 μg, 56 μg, 57 μg, 58 μg, 59 μg, 60 μg, 61 μg, 62 μg, 63 μg, 64 μg, 65 μg, 66 μg, 67 μg, 68 μg, 69 μg, 70 μg, 71 μg, 72 μg, 73 μg, 74 μg, 75 μg, 76 μg, 77 μg, 78 μg, 79 μg, 80 μg, 81 μg, 82 μg, 83 μg, 84 μg, 85 μg, 86 μg, 87 μg, 88 μg, 89 μg, 90 μg, 91 μg, 92 μg, 93 μg, 94 μg, 95 μg, 96 μg, 97 μg, 98 μg, 99 μg, 100 μg, 101 μg, 102 μg, 103 μg, 104 μg, 105 μg, 106 μg, 107 μg, 108 μg, 109 μg, 110 μg, 111 μg, 112 μg, 113 μg, 114 μg, 115 μg, 116 μg, 117 μg, 118 μg, 119 μg, or 120 μg; from 16 μg to: 17 μg, 18 μg, 19 μg, 20 μg, 21 μg, 22 μg, 23 μg, 24 μg, 25 μg, 26 μg, 27 μg, 28 μg, 29 μg, 30 μg, 31 μg, 32 μg, 33 μg, 34 μg, 35 μg, 36 μg, 37 μg, 38 μg, 39 μg, 40 μg, 41 μg, 42 μg, 43 μg, 44 μg, 45 μg, 46 μg, 47 μg, 48 μg, 49 μg, 50 μg, 51 μg, 52 μg, 53 μg, 54 μg, 55 μg, 56 μg, 57 μg, 58 μg, 59 μg, 60 μg, 61 μg, 62 μg, 63 μg, 64 μg, 65 μg, 66 μg, 67 μg, 68 μg, 69 μg, 70 μg, 71 μg, 72 μg, 73 μg, 74 μg, 75 μg, 76 μg, 77 μg, 78 μg, 79 μg, 80 μg, 81 μg, 82 μg, 83 μg, 84 μg, 85 μg, 86 μg, 87 μg, 88 μg, 89 μg, 90 μg, 91 μg, 92 μg, 93 μg, 94 μg, 95 μg, 96 μg, 97 μg, 98 μg, 99 μg, 100 μg, 101 μg, 102 μg, 103 μg, 104 μg, 105 μg, 106 μg, 107 μg, 108 μg, 109 μg, 110 μg, 111 μg, 112 μg, 113 μg, 114 μg, 115 μg, 116 μg, 117 μg, 118 μg, 119 μg, or 120 μg; from 17 μg to: 18 μg, 19 μg, 20 μg, 21 μg, 22 μg, 23 μg, 24 μg, 25 μg, 26 μg, 27 μg, 28 μg, 29 μg, 30 μg, 31 μg, 32 μg, 33 μg, 34 μg, 35 μg, 36 μg, 37 μg, 38 μg, 39 μg, 40 μg, 41 μg, 42 μg, 43 μg, 44 μg, 45 μg, 46 μg, 47 μg, 48 μg, 49 μg, 50 μg, 51 μg, 52 μg, 53 μg, 54 μg, 55 μg, 56 μg, 57 μg, 58 μg, 59 μg, 60 μg, 61 μg, 62 μg, 63 μg, 64 μg, 65 μg, 66 μg, 67 μg, 68 μg, 69 μg, 70 μg, 71 μg, 72 μg, 73 μg, 74 μg, 75 μg, 76 μg, 77 μg, 78 μg, 79 μg, 80 μg, 81 μg, 82 μg, 83 μg, 84 μg, 85 μg, 86 μg, 87 μg, 88 μg, 89 μg, 90 μg, 91 μg, 92 μg, 93 μg, 94 μg, 95 μg, 96 μg, 97 μg, 98 μg, 99 μg, 100 μg, 101 μg, 102 μg, 103 μg, 104 μg, 105 μg, 106 μg, 107 μg, 108 μg, 109 μg, 110 μg, 111 μg, 112 μg, 113 μg, 114 μg, 115 μg, 116 μg, 117 μg, 118 μg, 119 μg, or 120 μg; from 18 μg to: 19 μg, 20 μg, 21 μg, 22 μg, 23 μg, 24 μg, 25 μg, 26 μg, 27 μg, 28 μg, 29 μg, 30 μg, 31 μg, 32 μg, 33 μg, 34 μg, 35 μg, 36 μg, 37 μg, 38 μg, 39 μg, 40 μg, 41 μg, 42 μg, 43 μg, 44 μg, 45 μg, 46 μg, 47 μg, 48 μg, 49 μg, 50 μg, 51 μg, 52 μg, 53 μg, 54 μg, 55 μg, 56 μg, 57 μg, 58 μg, 59 μg, 60 μg, 61 μg, 62 μg, 63 μg, 64 μg, 65 μg, 66 μg, 67 μg, 68 μg, 69 μg, 70 μg, 71 μg, 72 μg, 73 μg, 74 μg, 75 μg, 76 μg, 77 μg, 78 μg, 79 μg, 80 μg, 81 μg, 82 μg, 83 μg, 84 μg, 85 μg, 86 μg, 87 μg, 88 μg, 89 μg, 90 μg, 91 μg, 92 μg, 93 μg, 94 μg, 95 μg, 96 μg, 97 μg, 98 μg, 99 μg, 100 μg, 101 μg, 102 μg, 103 μg, 104 μg, 105 μg, 106 μg, 107 μg, 108 μg, 109 μg, 110 μg, 111 μg, 112 μg, 113 μg, 114 μg, 115 μg, 116 μg, 117 μg, 118 μg, 119 μg, or 120 μg; from 19 μg to: 20 μg, 21 μg, 22 μg, 23 μg, 24 μg, 25 μg, 26 μg, 27 μg, 28 μg, 29 μg, 30 μg, 31 μg, 32 μg, 33 μg, 34 μg, 35 μg, 36 μg, 37 μg, 38 μg, 39 μg, 40 μg, 41 μg, 42 μg, 43 μg, 44 μg, 45 μg, 46 μg, 47 μg, 48 μg, 49 μg, 50 μg, 51 μg, 52 μg, 53 μg, 54 μg, 55 μg, 56 μg, 57 μg, 58 μg, 59 μg, 60 μg, 61 μg, 62 μg, 63 μg, 64 μg, 65 μg, 66 μg, 67 μg, 68 μg, 69 μg, 70 μg, 71 μg, 72 μg, 73 μg, 74 μg, 75 μg, 76 μg, 77 μg, 78 μg, 79 μg, 80 μg, 81 μg, 82 μg, 83 μg, 84 μg, 85 μg, 86 μg, 87 μg, 88 μg, 89 μg, 90 μg, 91 μg, 92 μg, 93 μg, 94 μg, 95 μg, 96 μg, 97 μg, 98 μg, 99 μg, 100 μg, 101 μg, 102 μg, 103 μg, 104 μg, 105 μg, 106 μg, 107 μg, 108 μg, 109 μg, 110 μg, 111 μg, 112 μg, 113 μg, 114 μg, 115 μg, 116 μg, 117 μg, 118 μg, 119 μg, or 120 μg; from 20 μg to: 21 μg, 22 μg, 23 μg, 24 μg, 25 μg, 26 μg, 27 μg, 28 μg, 29 μg, 30 μg, 31 μg, 32 μg, 33 μg, 34 μg, 35 μg, 36 μg, 37 μg, 38 μg, 39 μg, 40 μg, 41 μg, 42 μg, 43 μg, 44 μg, 45 μg, 46 μg, 47 μg, 48 μg, 49 μg, 50 μg, 51 μg, 52 μg, 53 μg, 54 μg, 55 μg, 56 μg, 57 μg, 58 μg, 59 μg, 60 μg, 61 μg, 62 μg, 63 μg, 64 μg, 65 μg, 66 μg, 67 μg, 68 μg, 69 μg, 70 μg, 71 μg, 72 μg, 73 μg, 74 μg, 75 μg, 76 μg, 77 μg, 78 μg, 79 μg, 80 μg, 81 μg, 82 μg, 83 μg, 84 μg, 85 μg, 86 μg, 87 μg, 88 μg, 89 μg, 90 μg, 91 μg, 92 μg, 93 μg, 94 μg, 95 μg, 96 μg, 97 μg, 98 μg, 99 μg, 100 μg, 101 μg, 102 μg, 103 μg, 104 μg, 105 μg, 106 μg, 107 μg, 108 μg, 109 μg, 110 μg, 111 μg, 112 μg, 113 μg, 114 μg, 115 μg, 116 μg, 117 μg, 118 μg, 119 μg, or 120 μg; from 21 μg to: 22 μg, 23 μg, 24 μg, 25 μg, 26 μg, 27 μg, 28 μg, 29 μg, 30 μg, 31 μg, 32 μg, 33 μg, 34 μg, 35 μg, 36 μg, 37 μg, 38 μg, 39 μg, 40 μg, 41 μg, 42 μg, 43 μg, 44 μg, 45 μg, 46 μg, 47 μg, 48 μg, 49 μg, 50 μg, 51 μg, 52 μg, 53 μg, 54 μg, 55 μg, 56 μg, 57 μg, 58 μg, 59 μg, 60 μg, 61 μg, 62 μg, 63 μg, 64 μg, 65 μg, 66 μg, 67 μg, 68 μg, 69 μg, 70 μg, 71 μg, 72 μg, 73 μg, 74 μg, 75 μg, 76 μg, 77 μg, 78 μg, 79 μg, 80 μg, 81 μg, 82 μg, 83 μg, 84 μg, 85 μg, 86 μg, 87 μg, 88 μg, 89 μg, 90 μg, 91 μg, 92 μg, 93 μg, 94 μg, 95 μg, 96 μg, 97 μg, 98 μg, 99 μg, 100 μg, 101 μg, 102 μg, 103 μg, 104 μg, 105 μg, 106 μg, 107 μg, 108 μg, 109 μg, 110 μg, 111 μg, 112 μg, 113 μg, 114 μg, 115 μg, 116 μg, 117 μg, 118 μg, 119 μg, or 120 μg; from 22 μg to: 23 μg, 24 μg, 25 μg, 26 μg, 27 μg, 28 μg, 29 μg, 30 μg, 31 μg, 32 μg, 33 μg, 34 μg, 35 μg, 36 μg, 37 μg, 38 μg, 39 μg, 40 μg, 41 μg, 42 μg, 43 μg, 44 μg, 45 μg, 46 μg, 47 μg, 48 μg, 49 μg, 50 μg, 51 μg, 52 μg, 53 μg, 54 μg, 55 μg, 56 μg, 57 μg, 58 μg, 59 μg, 60 μg, 61 μg, 62 μg, 63 μg, 64 μg, 65 μg, 66 μg, 67 μg, 68 μg, 69 μg, 70 μg, 71 μg, 72 μg, 73 μg, 74 μg, 75 μg, 76 μg, 77 μg, 78 μg, 79 μg, 80 μg, 81 μg, 82 μg, 83 μg, 84 μg, 85 μg, 86 μg, 87 μg, 88 μg, 89 μg, 90 μg, 91 μg, 92 μg, 93 μg, 94 μg, 95 μg, 96 μg, 97 μg, 98 μg, 99 μg, 100 μg, 101 μg, 102 μg, 103 μg, 104 μg, 105 μg, 106 μg, 107 μg, 108 μg, 109 μg, 110 μg, 111 μg, 112 μg, 113 μg, 114 μg, 115 μg, 116 μg, 117 μg, 118 μg, 119 μg, or 120 μg; from 23 μg to: 24 μg, 25 μg, 26 μg, 27 μg, 28 μg, 29 μg, 30 μg, 31 μg, 32 μg, 33 μg, 34 μg, 35 μg, 36 μg, 37 μg, 38 μg, 39 μg, 40 μg, 41 μg, 42 μg, 43 μg, 44 μg, 45 μg, 46 μg, 47 μg, 48 μg, 49 μg, 50 μg, 51 μg, 52 μg, 53 μg, 54 μg, 55 μg, 56 μg, 57 μg, 58 μg, 59 μg, 60 μg, 61 μg, 62 μg, 63 μg, 64 μg, 65 μg, 66 μg, 67 μg, 68 μg, 69 μg, 70 μg, 71 μg, 72 μg, 73 μg, 74 μg, 75 μg, 76 μg, 77 μg, 78 μg, 79 μg, 80 μg, 81 μg, 82 μg, 83 μg, 84 μg, 85 μg, 86 μg, 87 μg, 88 μg, 89 μg, 90 μg, 91 μg, 92 μg, 93 μg, 94 μg, 95 μg, 96 μg, 97 μg, 98 μg, 99 μg, 100 μg, 101 μg, 102 μg, 103 μg, 104 μg, 105 μg, 106 μg, 107 μg, 108 μg, 109 μg, 110 μg, 111 μg, 112 μg, 113 μg, 114 μg, 115 μg, 116 μg, 117 μg, 118 μg, 119 μg, or 120 μg; from 24 μg to: 25 μg, 26 μg, 27 μg, 28 μg, 29 μg, 30 μg, 31 μg, 32 μg, 33 μg, 34 μg, 35 μg, 36 μg, 37 μg, 38 μg, 39 μg, 40 μg, 41 μg, 42 μg, 43 μg, 44 μg, 45 μg, 46 μg, 47 μg, 48 μg, 49 μg, 50 μg, 51 μg, 52 μg, 53 μg, 54 μg, 55 μg, 56 μg, 57 μg, 58 μg, 59 μg, 60 μg, 61 μg, 62 μg, 63 μg, 64 μg, 65 μg, 66 μg, 67 μg, 68 μg, 69 μg, 70 μg, 71 μg, 72 μg, 73 μg, 74 μg, 75 μg, 76 μg, 77 μg, 78 μg, 79 μg, 80 μg, 81 μg, 82 μg, 83 μg, 84 μg, 85 μg, 86 μg, 87 μg, 88 μg, 89 μg, 90 μg, 91 μg, 92 μg, 93 μg, 94 μg, 95 μg, 96 μg, 97 μg, 98 μg, 99 μg, 100 μg, 101 μg, 102 μg, 103 μg, 104 μg, 105 μg, 106 μg, 107 μg, 108 μg, 109 μg, 110 μg, 111 μg, 112 μg, 113 μg, 114 μg, 115 μg, 116 μg, 117 μg, 118 μg, 119 μg, or 120 μg; from 25 μg to: 26 μg, 27 μg, 28 μg, 29 μg, 30 μg, 31 μg, 32 μg, 33 μg, 34 μg, 35 μg, 36 μg, 37 μg, 38 μg, 39 μg, 40 μg, 41 μg, 42 μg, 43 μg, 44 μg, 45 μg, 46 μg, 47 μg, 48 μg, 49 μg, 50 μg, 51 μg, 52 μg, 53 μg, 54 μg, 55 μg, 56 μg, 57 μg, 58 μg, 59 μg, 60 μg, 61 μg, 62 μg, 63 μg, 64 μg, 65 μg, 66 μg, 67 μg, 68 μg, 69 μg, 70 μg, 71 μg, 72 μg, 73 μg, 74 μg, 75 μg, 76 μg, 77 μg, 78 μg, 79 μg, 80 μg, 81 μg, 82 μg, 83 μg, 84 μg, 85 μg, 86 μg, 87 μg, 88 μg, 89 μg, 90 μg, 91 μg, 92 μg, 93 μg, 94 μg, 95 μg, 96 μg, 97 μg, 98 μg, 99 μg, 100 μg, 101 μg, 102 μg, 103 μg, 104 μg, 105 μg, 106 μg, 107 μg, 108 μg, 109 μg, 110 μg, 111 μg, 112 μg, 113 μg, 114 μg, 115 μg, 116 μg, 117 μg, 118 μg, 119 μg, or 120 μg; from 26 μg to: 27 μg, 28 μg, 29 μg, 30 μg, 31 μg, 32 μg, 33 μg, 34 μg, 35 μg, 36 μg, 37 μg, 38 μg, 39 μg, 40 μg, 41 μg, 42 μg, 43 μg, 44 μg, 45 μg, 46 μg, 47 μg, 48 μg, 49 μg, 50 μg, 51 μg, 52 μg, 53 μg, 54 μg, 55 μg, 56 μg, 57 μg, 58 μg, 59 μg, 60 μg, 61 μg, 62 μg, 63 μg, 64 μg, 65 μg, 66 μg, 67 μg, 68 μg, 69 μg, 70 μg, 71 μg, 72 μg, 73 μg, 74 μg, 75 μg, 76 μg, 77 μg, 78 μg, 79 μg, 80 μg, 81 μg, 82 μg, 83 μg, 84 μg, 85 μg, 86 μg, 87 μg, 88 μg, 89 μg, 90 μg, 91 μg, 92 μg, 93 μg, 94 μg, 95 μg, 96 μg, 97 μg, 98 μg, 99 μg, 100 μg, 101 μg, 102 μg, 103 μg, 104 μg, 105 μg, 106 μg, 107 μg, 108 μg, 109 μg, 110 μg, 111 μg, 112 μg, 113 μg, 114 μg, 115 μg, 116 μg, 117 μg, 118 μg, 119 μg, or 120 μg; from 27 μg to: 28 μg, 29 μg, 30 μg, 31 μg, 32 μg, 33 μg, 34 μg, 35 μg, 36 μg, 37 μg, 38 μg, 39 μg, 40 μg, 41 μg, 42 μg, 43 μg, 44 μg, 45 μg, 46 μg, 47 μg, 48 μg, 49 μg, 50 μg, 51 μg, 52 μg, 53 μg, 54 μg, 55 μg, 56 μg, 57 μg, 58 μg, 59 μg, 60 μg, 61 μg, 62 μg, 63 μg, 64 μg, 65 μg, 66 μg, 67 μg, 68 μg, 69 μg, 70 μg, 71 μg, 72 μg, 73 μg, 74 μg, 75 μg, 76 μg, 77 μg, 78 μg, 79 μg, 80 μg, 81 μg, 82 μg, 83 μg, 84 μg, 85 μg, 86 μg, 87 μg, 88 μg, 89 μg, 90 μg, 91 μg, 92 μg, 93 μg, 94 μg, 95 μg, 96 μg, 97 μg, 98 μg, 99 μg, 100 μg, 101 μg, 102 μg, 103 μg, 104 μg, 105 μg, 106 μg, 107 μg, 108 μg, 109 μg, 110 μg, 111 μg, 112 μg, 113 μg, 114 μg, 115 μg, 116 μg, 117 μg, 118 μg, 119 μg, or 120 μg; from 28 μg to: 29 μg, 30 μg, 31 μg, 32 μg, 33 μg, 34 μg, 35 μg, 36 μg, 37 μg, 38 μg, 39 μg, 40 μg, 41 μg, 42 μg, 43 μg, 44 μg, 45 μg, 46 μg, 47 μg, 48 μg, 49 μg, 50 μg, 51 μg, 52 μg, 53 μg, 54 μg, 55 μg, 56 μg, 57 μg, 58 μg, 59 μg, 60 μg, 61 μg, 62 μg, 63 μg, 64 μg, 65 μg, 66 μg, 67 μg, 68 μg, 69 μg, 70 μg, 71 μg, 72 μg, 73 μg, 74 μg, 75 μg, 76 μg, 77 μg, 78 μg, 79 μg, 80 μg, 81 μg, 82 μg, 83 μg, 84 μg, 85 μg, 86 μg, 87 μg, 88 μg, 89 μg, 90 μg, 91 μg, 92 μg, 93 μg, 94 μg, 95 μg, 96 μg, 97 μg, 98 μg, 99 μg, 100 μg, 101 μg, 102 μg, 103 μg, 104 μg, 105 μg, 106 μg, 107 μg, 108 μg, 109 μg, 110 μg, 111 μg, 112 μg, 113 μg, 114 μg, 115 μg, 116 μg, 117 μg, 118 μg, 119 μg, or 120 μg; from 29 μg to: 30 μg, 31 μg, 32 μg, 33 μg, 34 μg, 35 μg, 36 μg, 37 μg, 38 μg, 39 μg, 40 μg, 41 μg, 42 μg, 43 μg, 44 μg, 45 μg, 46 μg, 47 μg, 48 μg, 49 μg, 50 μg, 51 μg, 52 μg, 53 μg, 54 μg, 55 μg, 56 μg, 57 μg, 58 μg, 59 μg, 60 μg, 61 μg, 62 μg, 63 μg, 64 μg, 65 μg, 66 μg, 67 μg, 68 μg, 69 μg, 70 μg, 71 μg, 72 μg, 73 μg, 74 μg, 75 μg, 76 μg, 77 μg, 78 μg, 79 μg, 80 μg, 81 μg, 82 μg, 83 μg, 84 μg, 85 μg, 86 μg, 87 μg, 88 μg, 89 μg, 90 μg, 91 μg, 92 μg, 93 μg, 94 μg, 95 μg, 96 μg, 97 μg, 98 μg, 99 μg, 100 μg, 101 μg, 102 μg, 103 μg, 104 μg, 105 μg, 106 μg, 107 μg, 108 μg, 109 μg, 110 μg, 111 μg, 112 μg, 113 μg, 114 μg, 115 μg, 116 μg, 117 μg, 118 μg, 119 μg, or 120 μg; from 30 μg to: 31 μg, 32 μg, 33 μg, 34 μg, 35 μg, 36 μg, 37 μg, 38 μg, 39 μg, 40 μg, 41 μg, 42 μg, 43 μg, 44 μg, 45 μg, 46 μg, 47 μg, 48 μg, 49 μg, 50 μg, 51 μg, 52 μg, 53 μg, 54 μg, 55 μg, 56 μg, 57 μg, 58 μg, 59 μg, 60 μg, 61 μg, 62 μg, 63 μg, 64 μg, 65 μg, 66 μg, 67 μg, 68 μg, 69 μg, 70 μg, 71 μg, 72 μg, 73 μg, 74 μg, 75 μg, 76 μg, 77 μg, 78 μg, 79 μg, 80 μg, 81 μg, 82 μg, 83 μg, 84 μg, 85 μg, 86 μg, 87 μg, 88 μg, 89 μg, 90 μg, 91 μg, 92 μg, 93 μg, 94 μg, 95 μg, 96 μg, 97 μg, 98 μg, 99 μg, 100 μg, 101 μg, 102 μg, 103 μg, 104 μg, 105 μg, 106 μg, 107 μg, 108 μg, 109 μg, 110 μg, 111 μg, 112 μg, 113 μg, 114 μg, 115 μg, 116 μg, 117 μg, 118 μg, 119 μg, or 120 μg; from 31 μg to: 32 μg, 33 μg, 34 μg, 35 μg, 36 μg, 37 μg, 38 μg, 39 μg, 40 μg, 41 μg, 42 μg, 43 μg, 44 μg, 45 μg, 46 μg, 47 μg, 48 μg, 49 μg, 50 μg, 51 μg, 52 μg, 53 μg, 54 μg, 55 μg, 56 μg, 57 μg, 58 μg, 59 μg, 60 μg, 61 μg, 62 μg, 63 μg, 64 μg, 65 μg, 66 μg, 67 μg, 68 μg, 69 μg, 70 μg, 71 μg, 72 μg, 73 μg, 74 μg, 75 μg, 76 μg, 77 μg, 78 μg, 79 μg, 80 μg, 81 μg, 82 μg, 83 μg, 84 μg, 85 μg, 86 μg, 87 μg, 88 μg, 89 μg, 90 μg, 91 μg, 92 μg, 93 μg, 94 μg, 95 μg, 96 μg, 97 μg, 98 μg, 99 μg, 100 μg, 101 μg, 102 μg, 103 μg, 104 μg, 105 μg, 106 μg, 107 μg, 108 μg, 109 μg, 110 μg, 111 μg, 112 μg, 113 μg, 114 μg, 115 μg, 116 μg, 117 μg, 118 μg, 119 μg, or 120 μg; from 32 μg to: 33 μg, 34 μg, 35 μg, 36 μg, 37 μg, 38 μg, 39 μg, 40 μg, 41 μg, 42 μg, 43 μg, 44 μg, 45 μg, 46 μg, 47 μg, 48 μg, 49 μg, 50 μg, 51 μg, 52 μg, 53 μg, 54 μg, 55 μg, 56 μg, 57 μg, 58 μg, 59 μg, 60 μg, 61 μg, 62 μg, 63 μg, 64 μg, 65 μg, 66 μg, 67 μg, 68 μg, 69 μg, 70 μg, 71 μg, 72 μg, 73 μg, 74 μg, 75 μg, 76 μg, 77 μg, 78 μg, 79 μg, 80 μg, 81 μg, 82 μg, 83 μg, 84 μg, 85 μg, 86 μg, 87 μg, 88 μg, 89 μg, 90 μg, 91 μg, 92 μg, 93 μg, 94 μg, 95 μg, 96 μg, 97 μg, 98 μg, 99 μg, 100 μg, 101 μg, 102 μg, 103 μg, 104 μg, 105 μg, 106 μg, 107 μg, 108 μg, 109 μg, 110 μg, 111 μg, 112 μg, 113 μg, 114 μg, 115 μg, 116 μg, 117 μg, 118 μg, 119 μg, or 120 μg; from 33 μg to: 34 μg, 35 μg, 36 μg, 37 μg, 38 μg, 39 μg, 40 μg, 41 μg, 42 μg, 43 μg, 44 μg, 45 μg, 46 μg, 47 μg, 48 μg, 49 μg, 50 μg, 51 μg, 52 μg, 53 μg, 54 μg, 55 μg, 56 μg, 57 μg, 58 μg, 59 μg, 60 μg, 61 μg, 62 μg, 63 μg, 64 μg, 65 μg, 66 μg, 67 μg, 68 μg, 69 μg, 70 μg, 71 μg, 72 μg, 73 μg, 74 μg, 75 μg, 76 μg, 77 μg, 78 μg, 79 μg, 80 μg, 81 μg, 82 μg, 83 μg, 84 μg, 85 μg, 86 μg, 87 μg, 88 μg, 89 μg, 90 μg, 91 μg, 92 μg, 93 μg, 94 μg, 95 μg, 96 μg, 97 μg, 98 μg, 99 μg, 100 μg, 101 μg, 102 μg, 103 μg, 104 μg, 105 μg, 106 μg, 107 μg, 108 μg, 109 μg, 110 μg, 111 μg, 112 μg, 113 μg, 114 μg, 115 μg, 116 μg, 117 μg, 118 μg, 119 μg, or 120 μg; from 34 μg to: 35 μg, 36 μg, 37 μg, 38 μg, 39 μg, 40 μg, 41 μg, 42 μg, 43 μg, 44 μg, 45 μg, 46 μg, 47 μg, 48 μg, 49 μg, 50 μg, 51 μg, 52 μg, 53 μg, 54 μg, 55 μg, 56 μg, 57 μg, 58 μg, 59 μg, 60 μg, 61 μg, 62 μg, 63 μg, 64 μg, 65 μg, 66 μg, 67 μg, 68 μg, 69 μg, 70 μg, 71 μg, 72 μg, 73 μg, 74 μg, 75 μg, 76 μg, 77 μg, 78 μg, 79 μg, 80 μg, 81 μg, 82 μg, 83 μg, 84 μg, 85 μg, 86 μg, 87 μg, 88 μg, 89 μg, 90 μg, 91 μg, 92 μg, 93 μg, 94 μg, 95 μg, 96 μg, 97 μg, 98 μg, 99 μg, 100 μg, 101 μg, 102 μg, 103 μg, 104 μg, 105 μg, 106 μg, 107 μg, 108 μg, 109 μg, 110 μg, 111 μg, 112 μg, 113 μg, 114 μg, 115 μg, 116 μg, 117 μg, 118 μg, 119 μg, or 120 μg; from 35 μg to: 36 μg, 37 μg, 38 μg, 39 μg, 40 μg, 41 μg, 42 μg, 43 μg, 44 μg, 45 μg, 46 μg, 47 μg, 48 μg, 49 μg, 50 μg, 51 μg, 52 μg, 53 μg, 54 μg, 55 μg, 56 μg, 57 μg, 58 μg, 59 μg, 60 μg, 61 μg, 62 μg, 63 μg, 64 μg, 65 μg, 66 μg, 67 μg, 68 μg, 69 μg, 70 μg, 71 μg, 72 μg, 73 μg, 74 μg, 75 μg, 76 μg, 77 μg, 78 μg, 79 μg, 80 μg, 81 μg, 82 μg, 83 μg, 84 μg, 85 μg, 86 μg, 87 μg, 88 μg, 89 μg, 90 μg, 91 μg, 92 μg, 93 μg, 94 μg, 95 μg, 96 μg, 97 μg, 98 μg, 99 μg, 100 μg, 101 μg, 102 μg, 103 μg, 104 μg, 105 μg, 106 μg, 107 μg, 108 μg, 109 μg, 110 μg, 111 μg, 112 μg, 113 μg, 114 μg, 115 μg, 116 μg, 117 μg, 118 μg, 119 μg, or 120 μg; from 36 μg to: 37 μg, 38 μg, 39 μg, 40 μg, 41 μg, 42 μg, 43 μg, 44 μg, 45 μg, 46 μg, 47 μg, 48 μg, 49 μg, 50 μg, 51 μg, 52 μg, 53 μg, 54 μg, 55 μg, 56 μg, 57 μg, 58 μg, 59 μg, 60 μg, 61 μg, 62 μg, 63 μg, 64 μg, 65 μg, 66 μg, 67 μg, 68 μg, 69 μg, 70 μg, 71 μg, 72 μg, 73 μg, 74 μg, 75 μg, 76 μg, 77 μg, 78 μg, 79 μg, 80 μg, 81 μg, 82 μg, 83 μg, 84 μg, 85 μg, 86 μg, 87 μg, 88 μg, 89 μg, 90 μg, 91 μg, 92 μg, 93 μg, 94 μg, 95 μg, 96 μg, 97 μg, 98 μg, 99 μg, 100 μg, 101 μg, 102 μg, 103 μg, 104 μg, 105 μg, 106 μg, 107 μg, 108 μg, 109 μg, 110 μg, 111 μg, 112 μg, 113 μg, 114 μg, 115 μg, 116 μg, 117 μg, 118 μg, 119 μg, or 120 μg; from 37 μg to: 38 μg, 39 μg, 40 μg, 41 μg, 42 μg, 43 μg, 44 μg, 45 μg, 46 μg, 47 μg, 48 μg, 49 μg, 50 μg, 51 μg, 52 μg, 53 μg, 54 μg, 55 μg, 56 μg, 57 μg, 58 μg, 59 μg, 60 μg, 61 μg, 62 μg, 63 μg, 64 μg, 65 μg, 66 μg, 67 μg, 68 μg, 69 μg, 70 μg, 71 μg, 72 μg, 73 μg, 74 μg, 75 μg, 76 μg, 77 μg, 78 μg, 79 μg, 80 μg, 81 μg, 82 μg, 83 μg, 84 μg, 85 μg, 86 μg, 87 μg, 88 μg, 89 μg, 90 μg, 91 μg, 92 μg, 93 μg, 94 μg, 95 μg, 96 μg, 97 μg, 98 μg, 99 μg, 100 μg, 101 μg, 102 μg, 103 μg, 104 μg, 105 μg, 106 μg, 107 μg, 108 μg, 109 μg, 110 μg, 111 μg, 112 μg, 113 μg, 114 μg, 115 μg, 116 μg, 117 μg, 118 μg, 119 μg, or 120 μg; from 38 μg to: 39 μg, 40 μg, 41 μg, 42 μg, 43 μg, 44 μg, 45 μg, 46 μg, 47 μg, 48 μg, 49 μg, 50 μg, 51 μg, 52 μg, 53 μg, 54 μg, 55 μg, 56 μg, 57 μg, 58 μg, 59 μg, 60 μg, 61 μg, 62 μg, 63 μg, 64 μg, 65 μg, 66 μg, 67 μg, 68 μg, 69 μg, 70 μg, 71 μg, 72 μg, 73 μg, 74 μg, 75 μg, 76 μg, 77 μg, 78 μg, 79 μg, 80 μg, 81 μg, 82 μg, 83 μg, 84 μg, 85 μg, 86 μg, 87 μg, 88 μg, 89 μg, 90 μg, 91 μg, 92 μg, 93 μg, 94 μg, 95 μg, 96 μg, 97 μg, 98 μg, 99 μg, 100 μg, 101 μg, 102 μg, 103 μg, 104 μg, 105 μg, 106 μg, 107 μg, 108 μg, 109 μg, 110 μg, 111 μg, 112 μg, 113 μg, 114 μg, 115 μg, 116 μg, 117 μg, 118 μg, 119 μg, or 120 μg; from 39 μg to: 40 μg, 41 μg, 42 μg, 43 μg, 44 μg, 45 μg, 46 μg, 47 μg, 48 μg, 49 μg, 50 μg, 51 μg, 52 μg, 53 μg, 54 μg, 55 μg, 56 μg, 57 μg, 58 μg, 59 μg, 60 μg, 61 μg, 62 μg, 63 μg, 64 μg, 65 μg, 66 μg, 67 μg, 68 μg, 69 μg, 70 μg, 71 μg, 72 μg, 73 μg, 74 μg, 75 μg, 76 μg, 77 μg, 78 μg, 79 μg, 80 μg, 81 μg, 82 μg, 83 μg, 84 μg, 85 μg, 86 μg, 87 μg, 88 μg, 89 μg, 90 μg, 91 μg, 92 μg, 93 μg, 94 μg, 95 μg, 96 μg, 97 μg, 98 μg, 99 μg, 100 μg, 101 μg, 102 μg, 103 μg, 104 μg, 105 μg, 106 μg, 107 μg, 108 μg, 109 μg, 110 μg, 111 μg, 112 μg, 113 μg, 114 μg, 115 μg, 116 μg, 117 μg, 118 μg, 119 μg, or 120 μg; from 40 μg to: 41 μg, 42 μg, 43 μg, 44 μg, 45 μg, 46 μg, 47 μg, 48 μg, 49 μg, 50 μg, 51 μg, 52 μg, 53 μg, 54 μg, 55 μg, 56 μg, 57 μg, 58 μg, 59 μg, 60 μg, 61 μg, 62 μg, 63 μg, 64 μg, 65 μg, 66 μg, 67 μg, 68 μg, 69 μg, 70 μg, 71 μg, 72 μg, 73 μg, 74 μg, 75 μg, 76 μg, 77 μg, 78 μg, 79 μg, 80 μg, 81 μg, 82 μg, 83 μg, 84 μg, 85 μg, 86 μg, 87 μg, 88 μg, 89 μg, 90 μg, 91 μg, 92 μg, 93 μg, 94 μg, 95 μg, 96 μg, 97 μg, 98 μg, 99 μg, 100 μg, 101 μg, 102 μg, 103 μg, 104 μg, 105 μg, 106 μg, 107 μg, 108 μg, 109 μg, 110 μg, 111 μg, 112 μg, 113 μg, 114 μg, 115 μg, 116 μg, 117 μg, 118 μg, 119 μg, or 120 μg; from 41 μg to: 41 μg, 42 μg, 43 μg, 44 μg, 45 μg, 46 μg, 47 μg, 48 μg, 49 μg, 50 μg, 51 μg, 52 μg, 53 μg, 54 μg, 55 μg, 56 μg, 57 μg, 58 μg, 59 μg, 60 μg, 61 μg, 62 μg, 63 μg, 64 μg, 65 μg, 66 μg, 67 μg, 68 μg, 69 μg, 70 μg, 71 μg, 72 μg, 73 μg, 74 μg, 75 μg, 76 μg, 77 μg, 78 μg, 79 μg, 80 μg, 81 μg, 82 μg, 83 μg, 84 μg, 85 μg, 86 μg, 87 μg, 88 μg, 89 μg, 90 μg, 91 μg, 92 μg, 93 μg, 94 μg, 95 μg, 96 μg, 97 μg, 98 μg, 99 μg, 100 μg, 101 μg, 102 μg, 103 μg, 104 μg, 105 μg, 106 μg, 107 μg, 108 μg, 109 μg, 110 μg, 111 μg, 112 μg, 113 μg, 114 μg, 115 μg, 116 μg, 117 μg, 118 μg, 119 μg, or 120 μg; from 42 μg to: 43 μg, 44 μg, 45 μg, 46 μg, 47 μg, 48 μg, 49 μg, 50 μg, 51 μg, 52 μg, 53 μg, 54 μg, 55 μg, 56 μg, 57 μg, 58 μg, 59 μg, 60 μg, 61 μg, 62 μg, 63 μg, 64 μg, 65 μg, 66 μg, 67 μg, 68 μg, 69 μg, 70 μg, 71 μg, 72 μg, 73 μg, 74 μg, 75 μg, 76 μg, 77 μg, 78 μg, 79 μg, 80 μg, 81 μg, 82 μg, 83 μg, 84 μg, 85 μg, 86 μg, 87 μg, 88 μg, 89 μg, 90 μg, 91 μg, 92 μg, 93 μg, 94 μg, 95 μg, 96 μg, 97 μg, 98 μg, 99 μg, 100 μg, 101 μg, 102 μg, 103 μg, 104 μg, 105 μg, 106 μg, 107 μg, 108 μg, 109 μg, 110 μg, 111 μg, 112 μg, 113 μg, 114 μg, 115 μg, 116 μg, 117 μg, 118 μg, 119 μg, or 120 μg; from 43 μg to: 44 μg, 45 μg, 46 μg, 47 μg, 48 μg, 49 μg, 50 μg, 51 μg, 52 μg, 53 μg, 54 μg, 55 μg, 56 μg, 57 μg, 58 μg, 59 μg, 60 μg, 61 μg, 62 μg, 63 μg, 64 μg, 65 μg, 66 μg, 67 μg, 68 μg, 69 μg, 70 μg, 71 μg, 72 μg, 73 μg, 74 μg, 75 μg, 76 μg, 77 μg, 78 μg, 79 μg, 80 μg, 81 μg, 82 μg, 83 μg, 84 μg, 85 μg, 86 μg, 87 μg, 88 μg, 89 μg, 90 μg, 91 μg, 92 μg, 93 μg, 94 μg, 95 μg, 96 μg, 97 μg, 98 μg, 99 μg, 100 μg, 101 μg, 102 μg, 103 μg, 104 μg, 105 μg, 106 μg, 107 μg, 108 μg, 109 μg, 110 μg, 111 μg, 112 μg, 113 μg, 114 μg, 115 μg, 116 μg, 117 μg, 118 μg, 119 μg, or 120 μg; from 44 μg to: 45 μg, 46 μg, 47 μg, 48 μg, 49 μg, 50 μg, 51 μg, 52 μg, 53 μg, 54 μg, 55 μg, 56 μg, 57 μg, 58 μg, 59 μg, 60 μg, 61 μg, 62 μg, 63 μg, 64 μg, 65 μg, 66 μg, 67 μg, 68 μg, 69 μg, 70 μg, 71 μg, 72 μg, 73 μg, 74 μg, 75 μg, 76 μg, 77 μg, 78 μg, 79 μg, 80 μg, 81 μg, 82 μg, 83 μg, 84 μg, 85 μg, 86 μg, 87 μg, 88 μg, 89 μg, 90 μg, 91 μg, 92 μg, 93 μg, 94 μg, 95 μg, 96 μg, 97 μg, 98 μg, 99 μg, 100 μg, 101 μg, 102 μg, 103 μg, 104 μg, 105 μg, 106 μg, 107 μg, 108 μg, 109 μg, 110 μg, 111 μg, 112 μg, 113 μg, 114 μg, 115 μg, 116 μg, 117 μg, 118 μg, 119 μg, or 120 μg; from 45 μg to: 46 μg, 47 μg, 48 μg, 49 μg, 50 μg, 51 μg, 52 μg, 53 μg, 54 μg, 55 μg, 56 μg, 57 μg, 58 μg, 59 μg, 60 μg, 61 μg, 62 μg, 63 μg, 64 μg, 65 μg, 66 μg, 67 μg, 68 μg, 69 μg, 70 μg, 71 μg, 72 μg, 73 μg, 74 μg, 75 μg, 76 μg, 77 μg, 78 μg, 79 μg, 80 μg, 81 μg, 82 μg, 83 μg, 84 μg, 85 μg, 86 μg, 87 μg, 88 μg, 89 μg, 90 μg, 91 μg, 92 μg, 93 μg, 94 μg, 95 μg, 96 μg, 97 μg, 98 μg, 99 μg, 100 μg, 101 μg, 102 μg, 103 μg, 104 μg, 105 μg, 106 μg, 107 μg, 108 μg, 109 μg, 110 μg, 111 μg, 112 μg, 113 μg, 114 μg, 115 μg, 116 μg, 117 μg, 118 μg, 119 μg, or 120 μg; from 46 μg to: 47 μg, 48 μg, 49 μg, 50 μg, 51 μg, 52 μg, 53 μg, 54 μg, 55 μg, 56 μg, 57 μg, 58 μg, 59 μg, 60 μg, 61 μg, 62 μg, 63 μg, 64 μg, 65 μg, 66 μg, 67 μg, 68 μg, 69 μg, 70 μg, 71 μg, 72 μg, 73 μg, 74 μg, 75 μg, 76 μg, 77 μg, 78 μg, 79 μg, 80 μg, 81 μg, 82 μg, 83 μg, 84 μg, 85 μg, 86 μg, 87 μg, 88 μg, 89 μg, 90 μg, 91 μg, 92 μg, 93 μg, 94 μg, 95 μg, 96 μg, 97 μg, 98 μg, 99 μg, 100 μg, 101 μg, 102 μg, 103 μg, 104 μg, 105 μg, 106 μg, 107 μg, 108 μg, 109 μg, 110 μg, 111 μg, 112 μg, 113 μg, 114 μg, 115 μg, 116 μg, 117 μg, 118 μg, 119 μg, or 120 μg; from 47 μg to: 48 μg, 49 μg, 50 μg, 51 μg, 52 μg, 53 μg, 54 μg, 55 μg, 56 μg, 57 μg, 58 μg, 59 μg, 60 μg, 61 μg, 62 μg, 63 μg, 64 μg, 65 μg, 66 μg, 67 μg, 68 μg, 69 μg, 70 μg, 71 μg, 72 μg, 73 μg, 74 μg, 75 μg, 76 μg, 77 μg, 78 μg, 79 μg, 80 μg, 81 μg, 82 μg, 83 μg, 84 μg, 85 μg, 86 μg, 87 μg, 88 μg, 89 μg, 90 μg, 91 μg, 92 μg, 93 μg, 94 μg, 95 μg, 96 μg, 97 μg, 98 μg, 99 μg, 100 μg, 101 μg, 102 μg, 103 μg, 104 μg, 105 μg, 106 μg, 107 μg, 108 μg, 109 μg, 110 μg, 111 μg, 112 μg, 113 μg, 114 μg, 115 μg, 116 μg, 117 μg, 118 μg, 119 μg, or 120 μg; from 48 μg to: 49 μg, 50 μg, 51 μg, 52 μg, 53 μg, 54 μg, 55 μg, 56 μg, 57 μg, 58 μg, 59 μg, 60 μg, 61 μg, 62 μg, 63 μg, 64 μg, 65 μg, 66 μg, 67 μg, 68 μg, 69 μg, 70 μg, 71 μg, 72 μg, 73 μg, 74 μg, 75 μg, 76 μg, 77 μg, 78 μg, 79 μg, 80 μg, 81 μg, 82 μg, 83 μg, 84 μg, 85 μg, 86 μg, 87 μg, 88 μg, 89 μg, 90 μg, 91 μg, 92 μg, 93 μg, 94 μg, 95 μg, 96 μg, 97 μg, 98 μg, 99 μg, 100 μg, 101 μg, 102 μg, 103 μg, 104 μg, 105 μg, 106 μg, 107 μg, 108 μg, 109 μg, 110 μg, 111 μg, 112 μg, 113 μg, 114 μg, 115 μg, 116 μg, 117 μg, 118 μg, 119 μg, or 120 μg; from 49 μg to: 50 μg, 51 μg, 52 μg, 53 μg, 54 μg, 55 μg, 56 μg, 57 μg, 58 μg, 59 μg, 60 μg, 61 μg, 62 μg, 63 μg, 64 μg, 65 μg, 66 μg, 67 μg, 68 μg, 69 μg, 70 μg, 71 μg, 72 μg, 73 μg, 74 μg, 75 μg, 76 μg, 77 μg, 78 μg, 79 μg, 80 μg, 81 μg, 82 μg, 83 μg, 84 μg, 85 μg, 86 μg, 87 μg, 88 μg, 89 μg, 90 μg, 91 μg, 92 μg, 93 μg, 94 μg, 95 μg, 96 μg, 97 μg, 98 μg, 99 μg, 100 μg, 101 μg, 102 μg, 103 μg, 104 μg, 105 μg, 106 μg, 107 μg, 108 μg, 109 μg, 110 μg, 111 μg, 112 μg, 113 μg, 114 μg, 115 μg, 116 μg, 117 μg, 118 μg, 119 μg, or 120 μg; from 50 μg to: 51 μg, 52 μg, 53 μg, 54 μg, 55 μg, 56 μg, 57 μg, 58 μg, 59 μg, 60 μg, 61 μg, 62 μg, 63 μg, 64 μg, 65 μg, 66 μg, 67 μg, 68 μg, 69 μg, 70 μg, 71 μg, 72 μg, 73 μg, 74 μg, 75 μg, 76 μg, 77 μg, 78 μg, 79 μg, 80 μg, 81 μg, 82 μg, 83 μg, 84 μg, 85 μg, 86 μg, 87 μg, 88 μg, 89 μg, 90 μg, 91 μg, 92 μg, 93 μg, 94 μg, 95 μg, 96 μg, 97 μg, 98 μg, 99 μg, 100 μg, 101 μg, 102 μg, 103 μg, 104 μg, 105 μg, 106 μg, 107 μg, 108 μg, 109 μg, 110 μg, 111 μg, 112 μg, 113 μg, 114 μg, 115 μg, 116 μg, 117 μg, 118 μg, 119 μg, or 120 μg; from 51 μg to: 52 μg, 53 μg, 54 μg, 55 μg, 56 μg, 57 μg, 58 μg, 59 μg, 60 μg, 61 μg, 62 μg, 63 μg, 64 μg, 65 μg, 66 μg, 67 μg, 68 μg, 69 μg, 70 μg, 71 μg, 72 μg, 73 μg, 74 μg, 75 μg, 76 μg, 77 μg, 78 μg, 79 μg, 80 μg, 81 μg, 82 μg, 83 μg, 84 μg, 85 μg, 86 μg, 87 μg, 88 μg, 89 μg, 90 μg, 91 μg, 92 μg, 93 μg, 94 μg, 95 μg, 96 μg, 97 μg, 98 μg, 99 μg, 100 μg, 101 μg, 102 μg, 103 μg, 104 μg, 105 μg, 106 μg, 107 μg, 108 μg, 109 μg, 110 μg, 111 μg, 112 μg, 113 μg, 114 μg, 115 μg, 116 μg, 117 μg, 118 μg, 119 μg, or 120 μg; from 52 μg to: 53 μg, 54 μg, 55 μg, 56 μg, 57 μg, 58 μg, 59 μg, 60 μg, 61 μg, 62 μg, 63 μg, 64 μg, 65 μg, 66 μg, 67 μg, 68 μg, 69 μg, 70 μg, 71 μg, 72 μg, 73 μg, 74 μg, 75 μg, 76 μg, 77 μg, 78 μg, 79 μg, 80 μg, 81 μg, 82 μg, 83 μg, 84 μg, 85 μg, 86 μg, 87 μg, 88 μg, 89 μg, 90 μg, 91 μg, 92 μg, 93 μg, 94 μg, 95 μg, 96 μg, 97 μg, 98 μg, 99 μg, 100 μg, 101 μg, 102 μg, 103 μg, 104 μg, 105 μg, 106 μg, 107 μg, 108 μg, 109 μg, 110 μg, 111 μg, 112 μg, 113 μg, 114 μg, 115 μg, 116 μg, 117 μg, 118 μg, 119 μg, or 120 μg; from 53 μg to: 54 μg, 55 μg, 56 μg, 57 μg, 58 μg, 59 μg, 60 μg, 61 μg, 62 μg, 63 μg, 64 μg, 65 μg, 66 μg, 67 μg, 68 μg, 69 μg, 70 μg, 71 μg, 72 μg, 73 μg, 74 μg, 75 μg, 76 μg, 77 μg, 78 μg, 79 μg, 80 μg, 81 μg, 82 μg, 83 μg, 84 μg, 85 μg, 86 μg, 87 μg, 88 μg, 89 μg, 90 μg, 91 μg, 92 μg, 93 μg, 94 μg, 95 μg, 96 μg, 97 μg, 98 μg, 99 μg, 100 μg, 101 μg, 102 μg, 103 μg, 104 μg, 105 μg, 106 μg, 107 μg, 108 μg, 109 μg, 110 μg, 111 μg, 112 μg, 113 μg, 114 μg, 115 μg, 116 μg, 117 μg, 118 μg, 119 μg, or 120 μg; from 54 μg to: 55 μg, 56 μg, 57 μg, 58 μg, 59 μg, 60 μg, 61 μg, 62 μg, 63 μg, 64 μg, 65 μg, 66 μg, 67 μg, 68 μg, 69 μg, 70 μg, 71 μg, 72 μg, 73 μg, 74 μg, 75 μg, 76 μg, 77 μg, 78 μg, 79 μg, 80 μg, 81 μg, 82 μg, 83 μg, 84 μg, 85 μg, 86 μg, 87 μg, 88 μg, 89 μg, 90 μg, 91 μg, 92 μg, 93 μg, 94 μg, 95 μg, 96 μg, 97 μg, 98 μg, 99 μg, 100 μg, 101 μg, 102 μg, 103 μg, 104 μg, 105 μg, 106 μg, 107 μg, 108 μg, 109 μg, 110 μg, 111 μg, 112 μg, 113 μg, 114 μg, 115 μg, 116 μg, 117 μg, 118 μg, 119 μg, or 120 μg; from 55 μg to: 56 μg, 57 μg, 58 μg, 59 μg, 60 μg, 61 μg, 62 μg, 63 μg, 64 μg, 65 μg, 66 μg, 67 μg, 68 μg, 69 μg, 70 μg, 71 μg, 72 μg, 73 μg, 74 μg, 75 μg, 76 μg, 77 μg, 78 μg, 79 μg, 80 μg, 81 μg, 82 μg, 83 μg, 84 μg, 85 μg, 86 μg, 87 μg, 88 μg, 89 μg, 90 μg, 91 μg, 92 μg, 93 μg, 94 μg, 95 μg, 96 μg, 97 μg, 98 μg, 99 μg, 100 μg, 101 μg, 102 μg, 103 μg, 104 μg, 105 μg, 106 μg, 107 μg, 108 μg, 109 μg, 110 μg, 111 μg, 112 μg, 113 μg, 114 μg, 115 μg, 116 μg, 117 μg, 118 μg, 119 μg, or 120 μg; from 56 μg to: 57 μg, 58 μg, 59 μg, 60 μg, 61 μg, 62 μg, 63 μg, 64 μg, 65 μg, 66 μg, 67 μg, 68 μg, 69 μg, 70 μg, 71 μg, 72 μg, 73 μg, 74 μg, 75 μg, 76 μg, 77 μg, 78 μg, 79 μg, 80 μg, 81 μg, 82 μg, 83 μg, 84 μg, 85 μg, 86 μg, 87 μg, 88 μg, 89 μg, 90 μg, 91 μg, 92 μg, 93 μg, 94 μg, 95 μg, 96 μg, 97 μg, 98 μg, 99 μg, 100 μg, 101 μg, 102 μg, 103 μg, 104 μg, 105 μg, 106 μg, 107 μg, 108 μg, 109 μg, 110 μg, 111 μg, 112 μg, 113 μg, 114 μg, 115 μg, 116 μg, 117 μg, 118 μg, 119 μg, or 120 μg; from 57 μg to: 58 μg, 59 μg, 60 μg, 61 μg, 62 μg, 63 μg, 64 μg, 65 μg, 66 μg, 67 μg, 68 μg, 69 μg, 70 μg, 71 μg, 72 μg, 73 μg, 74 μg, 75 μg, 76 μg, 77 μg, 78 μg, 79 μg, 80 μg, 81 μg, 82 μg, 83 μg, 84 μg, 85 μg, 86 μg, 87 μg, 88 μg, 89 μg, 90 μg, 91 μg, 92 μg, 93 μg, 94 μg, 95 μg, 96 μg, 97 μg, 98 μg, 99 μg, 100 μg, 101 μg, 102 μg, 103 μg, 104 μg, 105 μg, 106 μg, 107 μg, 108 μg, 109 μg, 110 μg, 111 μg, 112 μg, 113 μg, 114 μg, 115 μg, 116 μg, 117 μg, 118 μg, 119 μg, or 120 μg; from 58 μg to: 59 μg, 60 μg, 61 μg, 62 μg, 63 μg, 64 μg, 65 μg, 66 μg, 67 μg, 68 μg, 69 μg, 70 μg, 71 μg, 72 μg, 73 μg, 74 μg, 75 μg, 76 μg, 77 μg, 78 μg, 79 μg, 80 μg, 81 μg, 82 μg, 83 μg, 84 μg, 85 μg, 86 μg, 87 μg, 88 μg, 89 μg, 90 μg, 91 μg, 92 μg, 93 μg, 94 μg, 95 μg, 96 μg, 97 μg, 98 μg, 99 μg, 100 μg, 101 μg, 102 μg, 103 μg, 104 μg, 105 μg, 106 μg, 107 μg, 108 μg, 109 μg, 110 μg, 111 μg, 112 μg, 113 μg, 114 μg, 115 μg, 116 μg, 117 μg, 118 μg, 119 μg, or 120 μg; from 59 μg to: 60 μg, 61 μg, 62 μg, 63 μg, 64 μg, 65 μg, 66 μg, 67 μg, 68 μg, 69 μg, 70 μg, 71 μg, 72 μg, 73 μg, 74 μg, 75 μg, 76 μg, 77 μg, 78 μg, 79 μg, 80 μg, 81 μg, 82 μg, 83 μg, 84 μg, 85 μg, 86 μg, 87 μg, 88 μg, 89 μg, 90 μg, 91 μg, 92 μg, 93 μg, 94 μg, 95 μg, 96 μg, 97 μg, 98 μg, 99 μg, 100 μg, 101 μg, 102 μg, 103 μg, 104 μg, 105 μg, 106 μg, 107 μg, 108 μg, 109 μg, 110 μg, 111 μg, 112 μg, 113 μg, 114 μg, 115 μg, 116 μg, 117 μg, 118 μg, 119 μg, or 120 μg; from 60 μg to: 61 μg, 62 μg, 63 μg, 64 μg, 65 μg, 66 μg, 67 μg, 68 μg, 69 μg, 70 μg, 71 μg, 72 μg, 73 μg, 74 μg, 75 μg, 76 μg, 77 μg, 78 μg, 79 μg, 80 μg, 81 μg, 82 μg, 83 μg, 84 μg, 85 μg, 86 μg, 87 μg, 88 μg, 89 μg, 90 μg, 91 μg, 92 μg, 93 μg, 94 μg, 95 μg, 96 μg, 97 μg, 98 μg, 99 μg, 100 μg, 101 μg, 102 μg, 103 μg, 104 μg, 105 μg, 106 μg, 107 μg, 108 μg, 109 μg, 110 μg, 111 μg, 112 μg, 113 μg, 114 μg, 115 μg, 116 μg, 117 μg, 118 μg, 119 μg, or 120 μg; from 61 μg to: 62 μg, 63 μg, 64 μg, 65 μg, 66 μg, 67 μg, 68 μg, 69 μg, 70 μg, 71 μg, 72 μg, 73 μg, 74 μg, 75 μg, 76 μg, 77 μg, 78 μg, 79 μg, 80 μg, 81 μg, 82 μg, 83 μg, 84 μg, 85 μg, 86 μg, 87 μg, 88 μg, 89 μg, 90 μg, 91 μg, 92 μg, 93 μg, 94 μg, 95 μg, 96 μg, 97 μg, 98 μg, 99 μg, 100 μg, 101 μg, 102 μg, 103 μg, 104 μg, 105 μg, 106 μg, 107 μg, 108 μg, 109 μg, 110 μg, 111 μg, 112 μg, 113 μg, 114 μg, 115 μg, 116 μg, 117 μg, 118 μg, 119 μg, or 120 μg; from 62 μg to: 63 μg, 64 μg, 65 μg, 66 μg, 67 μg, 68 μg, 69 μg, 70 μg, 71 μg, 72 μg, 73 μg, 74 μg, 75 μg, 76 μg, 77 μg, 78 μg, 79 μg, 80 μg, 81 μg, 82 μg, 83 μg, 84 μg, 85 μg, 86 μg, 87 μg, 88 μg, 89 μg, 90 μg, 91 μg, 92 μg, 93 μg, 94 μg, 95 μg, 96 μg, 97 μg, 98 μg, 99 μg, 100 μg, 101 μg, 102 μg, 103 μg, 104 μg, 105 μg, 106 μg, 107 μg, 108 μg, 109 μg, 110 μg, 111 μg, 112 μg, 113 μg, 114 μg, 115 μg, 116 μg, 117 μg, 118 μg, 119 μg, or 120 μg; from 63 μg to: 64 μg, 65 μg, 66 μg, 67 μg, 68 μg, 69 μg, 70 μg, 71 μg, 72 μg, 73 μg, 74 μg, 75 μg, 76 μg, 77 μg, 78 μg, 79 μg, 80 μg, 81 μg, 82 μg, 83 μg, 84 μg, 85 μg, 86 μg, 87 μg, 88 μg, 89 μg, 90 μg, 91 μg, 92 μg, 93 μg, 94 μg, 95 μg, 96 μg, 97 μg, 98 μg, 99 μg, 100 μg, 101 μg, 102 μg, 103 μg, 104 μg, 105 μg, 106 μg, 107 μg, 108 μg, 109 μg, 110 μg, 111 μg, 112 μg, 113 μg, 114 μg, 115 μg, 116 μg, 117 μg, 118 μg, 119 μg, or 120 μg; from 64 μg to: 65 μg, 66 μg, 67 μg, 68 μg, 69 μg, 70 μg, 71 μg, 72 μg, 73 μg, 74 μg, 75 μg, 76 μg, 77 μg, 78 μg, 79 μg, 80 μg, 81 μg, 82 μg, 83 μg, 84 μg, 85 μg, 86 μg, 87 μg, 88 μg, 89 μg, 90 μg, 91 μg, 92 μg, 93 μg, 94 μg, 95 μg, 96 μg, 97 μg, 98 μg, 99 μg, 100 μg, 101 μg, 102 μg, 103 μg, 104 μg, 105 μg, 106 μg, 107 μg, 108 μg, 109 μg, 110 μg, 111 μg, 112 μg, 113 μg, 114 μg, 115 μg, 116 μg, 117 μg, 118 μg, 119 μg, or 120 μg; from 65 μg to: 66 μg, 67 μg, 68 μg, 69 μg, 70 μg, 71 μg, 72 μg, 73 μg, 74 μg, 75 μg, 76 μg, 77 μg, 78 μg, 79 μg, 80 μg, 81 μg, 82 μg, 83 μg, 84 μg, 85 μg, 86 μg, 87 μg, 88 μg, 89 μg, 90 μg, 91 μg, 92 μg, 93 μg, 94 μg, 95 μg, 96 μg, 97 μg, 98 μg, 99 μg, 100 μg, 101 μg, 102 μg, 103 μg, 104 μg, 105 μg, 106 μg, 107 μg, 108 μg, 109 μg, 110 μg, 111 μg, 112 μg, 113 μg, 114 μg, 115 μg, 116 μg, 117 μg, 118 μg, 119 μg, or 120 μg; from 66 μg to: 67 μg, 68 μg, 69 μg, 70 μg, 71 μg, 72 μg, 73 μg, 74 μg, 75 μg, 76 μg, 77 μg, 78 μg, 79 μg, 80 μg, 81 μg, 82 μg, 83 μg, 84 μg, 85 μg, 86 μg, 87 μg, 88 μg, 89 μg, 90 μg, 91 μg, 92 μg, 93 μg, 94 μg, 95 μg, 96 μg, 97 μg, 98 μg, 99 μg, 100 μg, 101 μg, 102 μg, 103 μg, 104 μg, 105 μg, 106 μg, 107 μg, 108 μg, 109 μg, 110 μg, 111 μg, 112 μg, 113 μg, 114 μg, 115 μg, 116 μg, 117 μg, 118 μg, 119 μg, or 120 μg; from 67 μg to: 68 μg, 69 μg, 70 μg, 71 μg, 72 μg, 73 μg, 74 μg, 75 μg, 76 μg, 77 μg, 78 μg, 79 μg, 80 μg, 81 μg, 82 μg, 83 μg, 84 μg, 85 μg, 86 μg, 87 μg, 88 μg, 89 μg, 90 μg, 91 μg, 92 μg, 93 μg, 94 μg, 95 μg, 96 μg, 97 μg, 98 μg, 99 μg, 100 μg, 101 μg, 102 μg, 103 μg, 104 μg, 105 μg, 106 μg, 107 μg, 108 μg, 109 μg, 110 μg, 111 μg, 112 μg, 113 μg, 114 μg, 115 μg, 116 μg, 117 μg, 118 μg, 119 μg, or 120 μg; from 68 μg to: 69 μg 70 μg, 71 μg, 72 μg, 73 μg, 74 μg, 75 μg, 76 μg, 77 μg, 78 μg, 79 μg, 80 μg, 81 μg, 82 μg, 83 μg, 84 μg, 85 μg, 86 μg, 87 μg, 88 μg, 89 μg, 90 μg, 91 μg, 92 μg, 93 μg, 94 μg, 95 μg, 96 μg, 97 μg, 98 μg, 99 μg, 100 μg, 101 μg, 102 μg, 103 μg, 104 μg, 105 μg, 106 μg, 107 μg, 108 μg, 109 μg, 110 μg, 111 μg, 112 μg, 113 μg, 114 μg, 115 μg, 116 μg, 117 μg, 118 μg, 119 μg, or 120 μg; from 69 μg to: 70 μg, 71 μg, 72 μg, 73 μg, 74 μg, 75 μg, 76 μg, 77 μg, 78 μg, 79 μg, 80 μg, 81 μg, 82 μg, 83 μg, 84 μg, 85 μg, 86 μg, 87 μg, 88 μg, 89 μg, 90 μg, 91 μg, 92 μg, 93 μg, 94 μg, 95 μg, 96 μg, 97 μg, 98 μg, 99 μg, 100 μg, 101 μg, 102 μg, 103 μg, 104 μg, 105 μg, 106 μg, 107 μg, 108 μg, 109 μg, 110 μg, 111 μg, 112 μg, 113 μg, 114 μg, 115 μg, 116 μg, 117 μg, 118 μg, 119 μg, or 120 μg; from 70 μg to: 71 μg, 72 μg, 73 μg, 74 μg, 75 μg, 76 μg, 77 μg, 78 μg, 79 μg, 80 μg, 81 μg, 82 μg, 83 μg, 84 μg, 85 μg, 86 μg, 87 μg, 88 μg, 89 μg, 90 μg, 91 μg, 92 μg, 93 μg, 94 μg, 95 μg, 96 μg, 97 μg, 98 μg, 99 μg, 100 μg, 101 μg, 102 μg, 103 μg, 104 μg, 105 μg, 106 μg, 107 μg, 108 μg, 109 μg, 110 μg, 111 μg, 112 μg, 113 μg, 114 μg, 115 μg, 116 μg, 117 μg, 118 μg, 119 μg, or 120 μg; from 71 μg to: 72 μg, 73 μg, 74 μg, 75 μg, 76 μg, 77 μg, 78 μg, 79 μg, 80 μg, 81 μg, 82 μg, 83 μg, 84 μg, 85 μg, 86 μg, 87 μg, 88 μg, 89 μg, 90 μg, 91 μg, 92 μg, 93 μg, 94 μg, 95 μg, 96 μg, 97 μg, 98 μg, 99 μg, 100 μg, 101 μg, 102 μg, 103 μg, 104 μg, 105 μg, 106 μg, 107 μg, 108 μg, 109 μg, 110 μg, 111 μg, 112 μg, 113 μg, 114 μg, 115 μg, 116 μg, 117 μg, 118 μg, 119 μg, or 120 μg; from 72 μg to: 73 μg, 74 μg, 75 μg, 76 μg, 77 μg, 78 μg, 79 μg, 80 μg, 81 μg, 82 μg, 83 μg, 84 μg, 85 μg, 86 μg, 87 μg, 88 μg, 89 μg, 90 μg, 91 μg, 92 μg, 93 μg, 94 μg, 95 μg, 96 μg, 97 μg, 98 μg, 99 μg, 100 μg, 101 μg, 102 μg, 103 μg, 104 μg, 105 μg, 106 μg, 107 μg, 108 μg, 109 μg, 110 μg, 111 μg, 112 μg, 113 μg, 114 μg, 115 μg, 116 μg, 117 μg, 118 μg, 119 μg, or 120 μg; from 73 μg to: 74 μg, 75 μg, 76 μg, 77 μg, 78 μg, 79 μg, 80 μg, 81 μg, 82 μg, 83 μg, 84 μg, 85 μg, 86 μg, 87 μg, 88 μg, 89 μg, 90 μg, 91 μg, 92 μg, 93 μg, 94 μg, 95 μg, 96 μg, 97 μg, 98 μg, 99 μg, 100 μg, 101 μg, 102 μg, 103 μg, 104 μg, 105 μg, 106 μg, 107 μg, 108 μg, 109 μg, 110 μg, 111 μg, 112 μg, 113 μg, 114 μg, 115 μg, 116 μg, 117 μg, 118 μg, 119 μg, or 120 μg; from 74 μg to: 75 μg, 76 μg, 77 μg, 78 μg, 79 μg, 80 μg, 81 μg, 82 μg, 83 μg, 84 μg, 85 μg, 86 μg, 87 μg, 88 μg, 89 μg, 90 μg, 91 μg, 92 μg, 93 μg, 94 μg, 95 μg, 96 μg, 97 μg, 98 μg, 99 μg, 100 μg, 101 μg, 102 μg, 103 μg, 104 μg, 105 μg, 106 μg, 107 μg, 108 μg, 109 μg, 110 μg, 111 μg, 112 μg, 113 μg, 114 μg, 115 μg, 116 μg, 117 μg, 118 μg, 119 μg, or 120 μg; from 75 μg to: 76 μg, 77 μg, 78 μg, 79 μg, 80 μg, 81 μg, 82 μg, 83 μg, 84 μg, 85 μg, 86 μg, 87 μg, 88 μg, 89 μg, 90 μg, 91 μg, 92 μg, 93 μg, 94 μg, 95 μg, 96 μg, 97 μg, 98 μg, 99 μg, 100 μg, 101 μg, 102 μg, 103 μg, 104 μg, 105 μg, 106 μg, 107 μg, 108 μg, 109 μg, 110 μg, 111 μg, 112 μg, 113 μg, 114 μg, 115 μg, 116 μg, 117 μg, 118 μg, 119 μg, or 120 μg; from 76 μg to: 77 μg, 78 μg, 79 μg, 80 μg, 81 μg, 82 μg, 83 μg, 84 μg, 85 μg, 86 μg, 87 μg, 88 μg, 89 μg, 90 μg, 91 μg, 92 μg, 93 μg, 94 μg, 95 μg, 96 μg, 97 μg, 98 μg, 99 μg, 100 μg, 101 μg, 102 μg, 103 μg, 104 μg, 105 μg, 106 μg, 107 μg, 108 μg, 109 μg, 110 μg, 111 μg, 112 μg, 113 μg, 114 μg, 115 μg, 116 μg, 117 μg, 118 μg, 119 μg, or 120 μg; from 77 μg to: 78 μg, 79 μg, 80 μg, 81 μg, 82 μg, 83 μg, 84 μg, 85 μg, 86 μg, 87 μg, 88 μg, 89 μg, 90 μg, 91 μg, 92 μg, 93 μg, 94 μg, 95 μg, 96 μg, 97 μg, 98 μg, 99 μg, 100 μg, 101 μg, 102 μg, 103 μg, 104 μg, 105 μg, 106 μg, 107 μg, 108 μg, 109 μg, 110 μg, 111 μg, 112 μg, 113 μg, 114 μg, 115 μg, 116 μg, 117 μg, 118 μg, 119 μg, or 120 μg; from 78 μg to: 79 μg, 80 μg, 81 μg, 82 μg, 83 μg, 84 μg, 85 μg, 86 μg, 87 μg, 88 μg, 89 μg, 90 μg, 91 μg, 92 μg, 93 μg, 94 μg, 95 μg, 96 μg, 97 μg, 98 μg, 99 μg, 100 μg, 101 μg, 102 μg, 103 μg, 104 μg, 105 μg, 106 μg, 107 μg, 108 μg, 109 μg, 110 μg, 111 μg, 112 μg, 113 μg, 114 μg, 115 μg, 116 μg, 117 μg, 118 μg, 119 μg, or 120 μg; from 79 μg to: 80 μg, 81 μg, 82 μg, 83 μg, 84 μg, 85 μg, 86 μg, 87 μg, 88 μg, 89 μg, 90 μg, 91 μg, 92 μg, 93 μg, 94 μg, 95 μg, 96 μg, 97 μg, 98 μg, 99 μg, 100 μg, 101 μg, 102 μg, 103 μg, 104 μg, 105 μg, 106 μg, 107 μg, 108 μg, 109 μg, 110 μg, 111 μg, 112 μg, 113 μg, 114 μg, 115 μg, 116 μg, 117 μg, 118 μg, 119 μg, or 120 μg; from 80 μg to: 81 μg, 82 μg, 83 μg, 84 μg, 85 μg, 86 μg, 87 μg, 88 μg, 89 μg, 90 μg, 91 μg, 92 μg, 93 μg, 94 μg, 95 μg, 96 μg, 97 μg, 98 μg, 99 μg, 100 μg, 101 μg, 102 μg, 103 μg, 104 μg, 105 μg, 106 μg, 107 μg, 108 μg, 109 μg, 110 μg, 111 μg, 112 μg, 113 μg, 114 μg, 115 μg, 116 μg, 117 μg, 118 μg, 119 μg, or 120 μg of recombinant RNA molecules per administration.

[0484] Also contemplated and supported are combinations of effective amounts of “at least” and any of the above-noted effective amounts of “no more than” with the effective amounts provided in an Example of this document. Also contemplated and supported are combinations of the effective amounts of the Example section of this document to provide a range (i.e. the effective amount from [the effective amount from example X₁] to [the effective amount from example X₂] wherein X₁ and X₂ represent any two exemplary treatments of the Examples.

[0485] In some embodiments, the above-noted methods comprise, is, or consist of more than one administration (i.e. two, three, four, five, six, or seven administrations). In some embodiments, the above-noted methods comprise, is, or consist of at least 2, 3, 4, 5, 6, 7, 8, 9, or 10 administrations (i.e. two, three, four, five, six, or seven administrations). In some embodiments, the above-noted methods comprise, is, or consist of no more than 15, 14, 13, 12, 11, 10, 9, 8, 7, 6, 5, 4, 3, or 2 administrations (i.e. two, three, four, five, six, or seven administrations). Taking the above-noted embodiments into account, it is contemplated and supported that any of the above-noted number of administrations of “at least” and “no more than” may be combined to provide an enclosed range (i.e. from 8 to 15 administrations). In some embodiments, the above-noted methods comprise, is, or consists of from 1 to: 2, 3, 4, 5, 6, 7, 8, 9, 10, 11, 12, 13, 14, or 15; from 2 to: 3, 4, 5, 6, 7, 8, 9, 10, 11, 12, 13, 14, or 15; 3 to: 4, 5, 6, 7, 8, 9, 10, 11, 12, 13, 14, or 15; from 4 to: 5, 6, 7, 8, 9, 10, 11, 12, 13, 14, or 15; from 5 to: 6, 7, 8, 9, 10, 11, 12, 13, 14, or 15; or from 6 to: 7, 8, 9, 10, 11, 12, 13, 14, or 15 administrations.

[0486] Also contemplated and supported are combinations of number of administrations of “at least” and number of administrations of “no more than” with the number of administrations provided in an Example of this document. Also contemplated and supported are combinations of the number of administrations of the Example section of this document to provide a range (i.e. the number of administrations from [the number of administrations from example X₁] to [number of administrations of example X₂] wherein X₁ and X₂ represent any two exemplary treatments of the Examples.

[0487] In some embodiments, the above-noted methods comprise, is, or consist of more than one administration of an effective amount (i.e. two, three, four, five, six, or seven administrations). In some embodiments, the above-noted methods comprise, is, or consist of at least 2, 3, 4, 5, 6, 7, 8, 9, or 10 administrations of an effective amount (i.e. two, three, four, five, six, or seven administrations of an effective amount). In some embodiments, the above-noted methods comprise, is, or consist of no more than 15, 14, 13, 12, 11, 10, 9, 8, 7, 6, 5, 4, 3, or 2 administrations of an effective amount (i.e. two, three, four, five, six, or seven administrations of an effective amount). Taking the above-noted embodiments into account, it is contemplated and supported that any of the above-noted number of administrations of the effective amount of “at least” and “no more than” may be combined to provide an enclosed range (i.e. from 8 to 15 administrations of the effective amount). In some embodiments, the above-noted methods comprise, is, or consists of from 1 to: 2, 3, 4, 5, 6, 7, 8, 9, 10, 11, 12, 13, 14, or 15; from 2 to: 3, 4, 5, 6, 7, 8, 9, 10, 11, 12, 13, 14, or 15; 3 to: 4, 5, 6, 7, 8, 9, 10, 11, 12, 13, 14, or 15; from 4 to: 5, 6, 7, 8, 9, 10, 11, 12, 13, 14, or 15; from 5 to: 6, 7, 8, 9, 10, 11, 12, 13, 14, or 15; or from 6 to: 7, 8, 9, 10, 11, 12, 13, 14, or 15 administrations of the effective amount.

[0488] Also contemplated and supported are combinations of number of administrations of “at least” and number of administrations of an effective amount of “no more than” with the number of administrations of an effective amount provided in an Example of this document. Also contemplated and supported are combinations of the number of administrations of an effective amount of the Example section of this document to provide a range (i.e. the number of administrations from [the number of administrations from example X₁] to [number of administrations of example X₂] wherein X, and X₂ represent any two exemplary treatments of the Examples.

[0489] In some embodiments, the administration comprises a primary administration and a booster administration. In some embodiments, the effective amount differs between the primary administration and the booster administration.

[0490] In some embodiments, the above-noted methods comprise, is, or consist of more than one primary administration (i.e. two, three, four, five, six, or seven administrations). In some embodiments, the above-noted methods comprise, is, or consist of at least 2, 3, 4, 5, 6, 7, 8, 9, or 10 primary administrations (i.e. two, three, four, five, six, or seven administrations of an effective amount). In some embodiments, the above-noted methods comprise, is, or consist of no more than 15, 14, 13, 12, 11, 10, 9, 8, 7, 6, 5, 4, 3, or 2 primary administrations (i.e. two, three, four, five, six, or seven administrations of an effective amount). Taking the above-noted embodiments into account, it is contemplated and supported that any of the above-noted number of primary administrations of “at least” and “no more than” may be combined to provide an enclosed range (i.e. from 8 to 15 primary administrations). In some embodiments, the above-noted methods comprise, is, or consists of from 1 to: 2, 3, 4, 5, 6, 7, 8, 9, 10, 11, 12, 13, 14, or 15; from 2 to: 3, 4, 5, 6, 7, 8, 9, 10, 11, 12, 13, 14, or 15; 3 to: 4, 5, 6, 7, 8, 9, 10, 11, 12, 13, 14, or 15; from 4 to: 5, 6, 7, 8, 9, 10, 11, 12, 13, 14, or 15; from 5 to: 6, 7, 8, 9, 10, 11, 12, 13, 14, or 15; or from 6 to: 7, 8, 9, 10, 11, 12, 13, 14, or 15 primary administrations.

[0491] Also contemplated and supported are combinations of the number of primary administrations of “at least” and the number of primary administrations of “no more than” with the number of primary administrations provided in an Example of this document. Also contemplated and supported are combinations of the number of primary administrations of the Example section of this document to provide a range (i.e. the number of primary administrations from [the number of primary administrations from example X₁] to [number of primary administrations of example X₂] wherein X, and X₂ represent any two exemplary treatments of the Examples.

[0492] In some embodiments, the primary administration comprises or is at least: 0.1 μg, 1 μg, 2 μg, 3 μg, 4 μg, 5 μg, 6 μg, 7 μg, 8 μg, 9 μg, 10 μg, 11 μg, 12 μg, 13 μg, 14 μg, 15 μg, 16 μg, 17 μg, 18 μg, 19 μg, 20 μg, 21 μg, 22 μg, 23 μg, 24 μg, 25 μg, 26 μg, 27 μg, 28 μg, 29 μg, 30 μg, 31 μg, 32 μg, 33 μg, 34 μg, 35 μg, 36 μg, 37 μg, 38 μg, 39 μg, 40 μg, 41 μg, 42 μg, 43 μg, 44 μg, 45 μg, 46 μg, 47 μg, 48 μg, 49 μg, 50 μg, 51 μg, 52 μg, 53 μg, 54 μg, 55 μg, 56 μg, 57 μg, 58 μg, 59 μg, 60 μg, 61 μg, 62 μg, 63 μg, 64 μg, 65 μg, 66 μg, 67 μg, 68 μg, 69 μg, 70 μg, 71 μg, 72 μg, 73 μg, 74 μg, 75 μg, 76 μg, 77 μg, 78 μg, 79 μg, 80 μg, 81 μg, 82 μg, 83 μg, 84 μg, 85 μg, 86 μg, 87 μg, 88 μg, 89 μg, 90 μg, 91 μg, 92 μg, 93 μg, 94 μg, 95 μg, 96 μg, 97 μg, 98 μg, 99 μg, 100 μg, 101 μg, 102 μg, 103 μg, 104 μg, 105 μg, 106 μg, 107 μg, 108 μg, 109 μg, 110 μg, 111 μg, 112 μg, 113 μg, 114 μg, 115 μg, 116 μg, 117 μg, 118 μg, 119 μg, or 120 μg of recombinant RNA molecules per primary administration. In some embodiments, the effective amount comprises or is no more than: 120 μg, 119 μg, 118 μg, 117 μg, 116 μg, 115 μg, 114 μg, 113 μg, 112 μg, 111 μg, 110 μg, 109 μg, 108 μg, 107 μg, 106 μg, 105 μg, 104 μg, 103 μg, 102 μg, 101 μg, 100 μg, 99 μg, 98 μg, 97 μg, 96 μg, 95 μg, 94 μg, 93 μg, 92 μg, 91 μg, 90 μg, 89 μg, 88 μg, 87 μg, 86 μg, 85 μg, 84 μg, 83 μg, 82 μg, 81 μg, 80 μg, 79 μg, 78 μg, 77 μg, 76 μg, 75 μg, 74 μg, 73 μg, 72 μg, 71 μg, 70 μg, 69 μg, 68 μg, 67 μg, 66 μg, 65 μg, 64 μg, 63 μg, 62 μg, 61 μg, 60 μg, 59 μg, 58 μg, 57 μg, 56 μg, 55 μg, 54 μg, 53 μg, 52 μg, 51 μg, 50 μg, 49 μg, 48 μg, 47 μg, 46 μg, 45 μg, 44 μg, 43 μg, 42 μg, 41 μg, 40 μg, 39 μg, 38 μg, 37 μg, 36 μg, 35 μg, 34 μg, 33 μg, 32 μg, 31 μg, 30 μg, 29 μg, 28 μg, 27 μg, 26 μg, 25 μg, 24 μg, 23 μg, 22 μg, 21 μg, 20 μg, 19 μg, 18 μg, 17 μg, 16 μg, or 15 μg of recombinant RNA molecules per primary administration. Taking the above-noted embodiments into account, it is contemplated and supported that any of the above-noted “pg” of “at least” and any of the above-noted “pg” of “no more than” may be combined to provide an enclosed range (i.e. the primary administration comprises or is from 25 μg to 75 μg of recombinant RNA molecules per primary administration). In some embodiments, the primary administration comprises or is from 1 μg to: 2 μg, 3 μg, 4 μg, 5 μg, 6 μg, 7 μg, 8 μg, 9 μg, 10 μg, 11 μg, 12 μg, 13 μg, 14 μg, 15 μg, 16 μg, 17 μg, 18 μg, 19 μg, 20 μg, 21 μg, 22 μg, 23 μg, 24 μg, 25 μg, 26 μg, 27 μg, 28 μg, 29 μg, 30 μg, 31 μg, 32 μg, 33 μg, 34 μg, 35 μg, 36 μg, 37 μg, 38 μg, 39 μg, 40 μg, 41 μg, 42 μg, 43 μg, 44 μg, 45 μg, 46 μg, 47 μg, 48 μg, 49 μg, 50 μg, 51 μg, 52 μg, 53 μg, 54 μg, 55 μg, 56 μg, 57 μg, 58 μg, 59 μg, 60 μg, 61 μg, 62 μg, 63 μg, 64 μg, 65 μg, 66 μg, 67 μg, 68 μg, 69 μg, 70 μg, 71 μg, 72 μg, 73 μg, 74 μg, 75 μg, 76 μg, 77 μg, 78 μg, 79 μg, 80 μg, 81 μg, 82 μg, 83 μg, 84 μg, 85 μg, 86 μg, 87 μg, 88 μg, 89 μg, 90 μg, 91 μg, 92 μg, 93 μg, 94 μg, 95 μg, 96 μg, 97 μg, 98 μg, 99 μg, 100 μg, 101 μg, 102 μg, 103 μg, 104 μg, 105 μg, 106 μg, 107 μg, 108 μg, 109 μg, 110 μg, 111 μg, 112 μg, 113 μg, 114 μg, 115 μg, 116 μg, 117 μg, 118 μg, 119 μg, or 120 μg; from 2 μg to: 3 μg, 4 μg, 5 μg, 6 μg, 7 μg, 8 μg, 9 μg, 10 μg, 11 μg, 12 μg, 13 μg, 14 μg, 15 μg, 16 μg, 17 μg, 18 μg, 19 μg, 20 μg, 21 μg, 22 μg, 23 μg, 24 μg, 25 μg, 26 μg, 27 μg, 28 μg, 29 μg, 30 μg, 31 μg, 32 μg, 33 μg, 34 μg, 35 μg, 36 μg, 37 μg, 38 μg, 39 μg, 40 μg, 41 μg, 42 μg, 43 μg, 44 μg, 45 μg, 46 μg, 47 μg, 48 μg, 49 μg, 50 μg, 51 μg, 52 μg, 53 μg, 54 μg, 55 μg, 56 μg, 57 μg, 58 μg, 59 μg, 60 μg, 61 μg, 62 μg, 63 μg, 64 μg, 65 μg, 66 μg, 67 μg, 68 μg, 69 μg, 70 μg, 71 μg, 72 μg, 73 μg, 74 μg, 75 μg, 76 μg, 77 μg, 78 μg, 79 μg, 80 μg, 81 μg, 82 μg, 83 μg, 84 μg, 85 μg, 86 μg, 87 μg, 88 μg, 89 μg, 90 μg, 91 μg, 92 μg, 93 μg, 94 μg, 95 μg, 96 μg, 97 μg, 98 μg, 99 μg, 100 μg, 101 μg, 102 μg, 103 μg, 104 μg, 105 μg, 106 μg, 107 μg, 108 μg, 109 μg, 110 μg, 111 μg, 112 μg, 113 μg, 114 μg, 115 μg, 116 μg, 117 μg, 118 μg, 119 μg, or 120 μg; from 3 μg to: 4 μg, 5 μg, 6 μg, 7 μg, 8 μg, 9 μg, 10 μg, 11 μg, 12 μg, 13 μg, 14 μg, 15 μg, 16 μg, 17 μg, 18 μg, 19 μg, 20 μg, 21 μg, 22 μg, 23 μg, 24 μg, 25 μg, 26 μg, 27 μg, 28 μg, 29 μg, 30 μg, 31 μg, 32 μg, 33 μg, 34 μg, 35 μg, 36 μg, 37 μg, 38 μg, 39 μg, 40 μg, 41 μg, 42 μg, 43 μg, 44 μg, 45 μg, 46 μg, 47 μg, 48 μg, 49 μg, 50 μg, 51 μg, 52 μg, 53 μg, 54 μg, 55 μg, 56 μg, 57 μg, 58 μg, 59 μg, 60 μg, 61 μg, 62 μg, 63 μg, 64 μg, 65 μg, 66 μg, 67 μg, 68 μg, 69 μg, 70 μg, 71 μg, 72 μg, 73 μg, 74 μg, 75 μg, 76 μg, 77 μg, 78 μg, 79 μg, 80 μg, 81 μg, 82 μg, 83 μg, 84 μg, 85 μg, 86 μg, 87 μg, 88 μg, 89 μg, 90 μg, 91 μg, 92 μg, 93 μg, 94 μg, 95 μg, 96 μg, 97 μg, 98 μg, 99 μg, 100 μg, 101 μg, 102 μg, 103 μg, 104 μg, 105 μg, 106 μg, 107 μg, 108 μg, 109 μg, 110 μg, 111 μg, 112 μg, 113 μg, 114 μg, 115 μg, 116 μg, 117 μg, 118 μg, 119 μg, or 120 μg; from 4 μg to: 5 μg, 6 μg, 7 μg, 8 μg, 9 μg, 10 μg, 11 μg, 12 μg, 13 μg, 14 μg, 15 μg, 16 μg, 17 μg, 18 μg, 19 μg, 20 μg, 21 μg, 22 μg, 23 μg, 24 μg, 25 μg, 26 μg, 27 μg, 28 μg, 29 μg, 30 μg, 31 μg, 32 μg, 33 μg, 34 μg, 35 μg, 36 μg, 37 μg, 38 μg, 39 μg, 40 μg, 41 μg, 42 μg, 43 μg, 44 μg, 45 μg, 46 μg, 47 μg, 48 μg, 49 μg, 50 μg, 51 μg, 52 μg, 53 μg, 54 μg, 55 μg, 56 μg, 57 μg, 58 μg, 59 μg, 60 μg, 61 μg, 62 μg, 63 μg, 64 μg, 65 μg, 66 μg, 67 μg, 68 μg, 69 μg, 70 μg, 71 μg, 72 μg, 73 μg, 74 μg, 75 μg, 76 μg, 77 μg, 78 μg, 79 μg, 80 μg, 81 μg, 82 μg, 83 μg, 84 μg, 85 μg, 86 μg, 87 μg, 88 μg, 89 μg, 90 μg, 91 μg, 92 μg, 93 μg, 94 μg, 95 μg, 96 μg, 97 μg, 98 μg, 99 μg, 100 μg, 101 μg, 102 μg, 103 μg, 104 μg, 105 μg, 106 μg, 107 μg, 108 μg, 109 μg, 110 μg, 111 μg, 112 μg, 113 μg, 114 μg, 115 μg, 116 μg, 117 μg, 118 μg, 119 μg, or 120 μg; from 5 μg to: 6 μg, 7 μg, 8 μg, 9 μg, 10 μg, 11 μg, 12 μg, 13 μg, 14 μg, 15 μg, 16 μg, 17 μg, 18 μg, 19 μg, 20 μg, 21 μg, 22 μg, 23 μg, 24 μg, 25 μg, 26 μg, 27 μg, 28 μg, 29 μg, 30 μg, 31 μg, 32 μg, 33 μg, 34 μg, 35 μg, 36 μg, 37 μg, 38 μg, 39 μg, 40 μg, 41 μg, 42 μg, 43 μg, 44 μg, 45 μg, 46 μg, 47 μg, 48 μg, 49 μg, 50 μg, 51 μg, 52 μg, 53 μg, 54 μg, 55 μg, 56 μg, 57 μg, 58 μg, 59 μg, 60 μg, 61 μg, 62 μg, 63 μg, 64 μg, 65 μg, 66 μg, 67 μg, 68 μg, 69 μg, 70 μg, 71 μg, 72 μg, 73 μg, 74 μg, 75 μg, 76 μg, 77 μg, 78 μg, 79 μg, 80 μg, 81 μg, 82 μg, 83 μg, 84 μg, 85 μg, 86 μg, 87 μg, 88 μg, 89 μg, 90 μg, 91 μg, 92 μg, 93 μg, 94 μg, 95 μg, 96 μg, 97 μg, 98 μg, 99 μg, 100 μg, 101 μg, 102 μg, 103 μg, 104 μg, 105 μg, 106 μg, 107 μg, 108 μg, 109 μg, 110 μg, 111 μg, 112 μg, 113 μg, 114 μg, 115 μg, 116 μg, 117 μg, 118 μg, 119 μg, or 120 μg; from 6 μg to: 7 μg, 8 μg, 9 μg, 10 μg, 11 μg, 12 μg, 13 μg, 14 μg, 15 μg, 16 μg, 17 μg, 18 μg, 19 μg, 20 μg, 21 μg, 22 μg, 23 μg, 24 μg, 25 μg, 26 μg, 27 μg, 28 μg, 29 μg, 30 μg, 31 μg, 32 μg, 33 μg, 34 μg, 35 μg, 36 μg, 37 μg, 38 μg, 39 μg, 40 μg, 41 μg, 42 μg, 43 μg, 44 μg, 45 μg, 46 μg, 47 μg, 48 μg, 49 μg, 50 μg, 51 μg, 52 μg, 53 μg, 54 μg, 55 μg, 56 μg, 57 μg, 58 μg, 59 μg, 60 μg, 61 μg, 62 μg, 63 μg, 64 μg, 65 μg, 66 μg, 67 μg, 68 μg, 69 μg, 70 μg, 71 μg, 72 μg, 73 μg, 74 μg, 75 μg, 76 μg, 77 μg, 78 μg, 79 μg, 80 μg, 81 μg, 82 μg, 83 μg, 84 μg, 85 μg, 86 μg, 87 μg, 88 μg, 89 μg, 90 μg, 91 μg, 92 μg, 93 μg, 94 μg, 95 μg, 96 μg, 97 μg, 98 μg, 99 μg, 100 μg, 101 μg, 102 μg, 103 μg, 104 μg, 105 μg, 106 μg, 107 μg, 108 μg, 109 μg, 110 μg, 111 μg, 112 μg, 113 μg, 114 μg, 115 μg, 116 μg, 117 μg, 118 μg, 119 μg, or 120 μg; from 8 μg to: 9 μg, 10 μg, 11 μg, 12 μg, 13 μg, 14 μg, 15 μg, 16 μg, 17 μg, 18 μg, 19 μg, 20 μg, 21 μg, 22 μg, 23 μg, 24 μg, 25 μg, 26 μg, 27 μg, 28 μg, 29 μg, 30 μg, 31 μg, 32 μg, 33 μg, 34 μg, 35 μg, 36 μg, 37 μg, 38 μg, 39 μg, 40 μg, 41 μg, 42 μg, 43 μg, 44 μg, 45 μg, 46 μg, 47 μg, 48 μg, 49 μg, 50 μg, 51 μg, 52 μg, 53 μg, 54 μg, 55 μg, 56 μg, 57 μg, 58 μg, 59 μg, 60 μg, 61 μg, 62 μg, 63 μg, 64 μg, 65 μg, 66 μg, 67 μg, 68 μg, 69 μg, 70 μg, 71 μg, 72 μg, 73 μg, 74 μg, 75 μg, 76 μg, 77 μg, 78 μg, 79 μg, 80 μg, 81 μg, 82 μg, 83 μg, 84 μg, 85 μg, 86 μg, 87 μg, 88 μg, 89 μg, 90 μg, 91 μg, 92 μg, 93 μg, 94 μg, 95 μg, 96 μg, 97 μg, 98 μg, 99 μg, 100 μg, 101 μg, 102 μg, 103 μg, 104 μg, 105 μg, 106 μg, 107 μg, 108 μg, 109 μg, 110 μg, 111 μg, 112 μg, 113 μg, 114 μg, 115 μg, 116 μg, 117 μg, 118 μg, 119 μg, or 120 μg; from 9 μg to: 10 μg, 11 μg, 12 μg, 13 μg, 14 μg, 15 μg, 16 μg, 17 μg, 18 μg, 19 μg, 20 μg, 21 μg, 22 μg, 23 μg, 24 μg, 25 μg, 26 μg, 27 μg, 28 μg, 29 μg, 30 μg, 31 μg, 32 μg, 33 μg, 34 μg, 35 μg, 36 μg, 37 μg, 38 μg, 39 μg, 40 μg, 41 μg, 42 μg, 43 μg, 44 μg, 45 μg, 46 μg, 47 μg, 48 μg, 49 μg, 50 μg, 51 μg, 52 μg, 53 μg, 54 μg, 55 μg, 56 μg, 57 μg, 58 μg, 59 μg, 60 μg, 61 μg, 62 μg, 63 μg, 64 μg, 65 μg, 66 μg, 67 μg, 68 μg, 69 μg, 70 μg, 71 μg, 72 μg, 73 μg, 74 μg, 75 μg, 76 μg, 77 μg, 78 μg, 79 μg, 80 μg, 81 μg, 82 μg, 83 μg, 84 μg, 85 μg, 86 μg, 87 μg, 88 μg, 89 μg, 90 μg, 91 μg, 92 μg, 93 μg, 94 μg, 95 μg, 96 μg, 97 μg, 98 μg, 99 μg, 100 μg, 101 μg, 102 μg, 103 μg, 104 μg, 105 μg, 106 μg, 107 μg, 108 μg, 109 μg, 110 μg, 111 μg, 112 μg, 113 μg, 114 μg, 115 μg, 116 μg, 117 μg, 118 μg, 119 μg, or 120 μg; from 10 μg to: 11 μg, 12 μg, 13 μg, 14 μg, 15 μg, 16 μg, 17 μg, 18 μg, 19 μg, 20 μg, 21 μg, 22 μg, 23 μg, 24 μg, 25 μg, 26 μg, 27 μg, 28 μg, 29 μg, 30 μg, 31 μg, 32 μg, 33 μg, 34 μg, 35 μg, 36 μg, 37 μg, 38 μg, 39 μg, 40 μg, 41 μg, 42 μg, 43 μg, 44 μg, 45 μg, 46 μg, 47 μg, 48 μg, 49 μg, 50 μg, 51 μg, 52 μg, 53 μg, 54 μg, 55 μg, 56 μg, 57 μg, 58 μg, 59 μg, 60 μg, 61 μg, 62 μg, 63 μg, 64 μg, 65 μg, 66 μg, 67 μg, 68 μg, 69 μg, 70 μg, 71 μg, 72 μg, 73 μg, 74 μg, 75 μg, 76 μg, 77 μg, 78 μg, 79 μg, 80 μg, 81 μg, 82 μg, 83 μg, 84 μg, 85 μg, 86 μg, 87 μg, 88 μg, 89 μg, 90 μg, 91 μg, 92 μg, 93 μg, 94 μg, 95 μg, 96 μg, 97 μg, 98 μg, 99 μg, 100 μg, 101 μg, 102 μg, 103 μg, 104 μg, 105 μg, 106 μg, 107 μg, 108 μg, 109 μg, 110 μg, 111 μg, 112 μg, 113 μg, 114 μg, 115 μg, 116 μg, 117 μg, 118 μg, 119 μg, or 120 μg; from 11 μg to: 12 μg, 13 μg, 14 μg, 15 μg, 16 μg, 17 μg, 18 μg, 19 μg, 20 μg, 21 μg, 22 μg, 23 μg, 24 μg, 25 μg, 26 μg, 27 μg, 28 μg, 29 μg, 30 μg, 31 μg, 32 μg, 33 μg, 34 μg, 35 μg, 36 μg, 37 μg, 38 μg, 39 μg, 40 μg, 41 μg, 42 μg, 43 μg, 44 μg, 45 μg, 46 μg, 47 μg, 48 μg, 49 μg, 50 μg, 51 μg, 52 μg, 53 μg, 54 μg, 55 μg, 56 μg, 57 μg, 58 μg, 59 μg, 60 μg, 61 μg, 62 μg, 63 μg, 64 μg, 65 μg, 66 μg, 67 μg, 68 μg, 69 μg, 70 μg, 71 μg, 72 μg, 73 μg, 74 μg, 75 μg, 76 μg, 77 μg, 78 μg, 79 μg, 80 μg, 81 μg, 82 μg, 83 μg, 84 μg, 85 μg, 86 μg, 87 μg, 88 μg, 89 μg, 90 μg, 91 μg, 92 μg, 93 μg, 94 μg, 95 μg, 96 μg, 97 μg, 98 μg, 99 μg, 100 μg, 101 μg, 102 μg, 103 μg, 104 μg, 105 μg, 106 μg, 107 μg, 108 μg, 109 μg, 110 μg, 111 μg, 112 μg, 113 μg, 114 μg, 115 μg, 116 μg, 117 μg, 118 μg, 119 μg, or 120 μg; from 12 μg to: 13 μg, 14 μg, 15 μg, 16 μg, 17 μg, 18 μg, 19 μg, 20 μg, 21 μg, 22 μg, 23 μg, 24 μg, 25 μg, 26 μg, 27 μg, 28 μg, 29 μg, 30 μg, 31 μg, 32 μg, 33 μg, 34 μg, 35 μg, 36 μg, 37 μg, 38 μg, 39 μg, 40 μg, 41 μg, 42 μg, 43 μg, 44 μg, 45 μg, 46 μg, 47 μg, 48 μg, 49 μg, 50 μg, 51 μg, 52 μg, 53 μg, 54 μg, 55 μg, 56 μg, 57 μg, 58 μg, 59 μg, 60 μg, 61 μg, 62 μg, 63 μg, 64 μg, 65 μg, 66 μg, 67 μg, 68 μg, 69 μg, 70 μg, 71 μg, 72 μg, 73 μg, 74 μg, 75 μg, 76 μg, 77 μg, 78 μg, 79 μg, 80 μg, 81 μg, 82 μg, 83 μg, 84 μg, 85 μg, 86 μg, 87 μg, 88 μg, 89 μg, 90 μg, 91 μg, 92 μg, 93 μg, 94 μg, 95 μg, 96 μg, 97 μg, 98 μg, 99 μg, 100 μg, 101 μg, 102 μg, 103 μg, 104 μg, 105 μg, 106 μg, 107 μg, 108 μg, 109 μg, 110 μg, 111 μg, 112 μg, 113 μg, 114 μg, 115 μg, 116 μg, 117 μg, 118 μg, 119 μg, or 120 μg; from 13 μg to: 14 μg, 15 μg, 16 μg, 17 μg, 18 μg, 19 μg, 20 μg, 21 μg, 22 μg, 23 μg, 24 μg, 25 μg, 26 μg, 27 μg, 28 μg, 29 μg, 30 μg, 31 μg, 32 μg, 33 μg, 34 μg, 35 μg, 36 μg, 37 μg, 38 μg, 39 μg, 40 μg, 41 μg, 42 μg, 43 μg, 44 μg, 45 μg, 46 μg, 47 μg, 48 μg, 49 μg, 50 μg, 51 μg, 52 μg, 53 μg, 54 μg, 55 μg, 56 μg, 57 μg, 58 μg, 59 μg, 60 μg, 61 μg, 62 μg, 63 μg, 64 μg, 65 μg, 66 μg, 67 μg, 68 μg, 69 μg, 70 μg, 71 μg, 72 μg, 73 μg, 74 μg, 75 μg, 76 μg, 77 μg, 78 μg, 79 μg, 80 μg, 81 μg, 82 μg, 83 μg, 84 μg, 85 μg, 86 μg, 87 μg, 88 μg, 89 μg, 90 μg, 91 μg, 92 μg, 93 μg, 94 μg, 95 μg, 96 μg, 97 μg, 98 μg, 99 μg, 100 μg, 101 μg, 102 μg, 103 μg, 104 μg, 105 μg, 106 μg, 107 μg, 108 μg, 109 μg, 110 μg, 111 μg, 112 μg, 113 μg, 114 μg, 115 μg, 116 μg, 117 μg, 118 μg, 119 μg, or 120 μg; from 14 μg to: 15 μg, 16 μg, 17 μg, 18 μg, 19 μg, 20 μg, 21 μg, 22 μg, 23 μg, 24 μg, 25 μg, 26 μg, 27 μg, 28 μg, 29 μg, 30 μg, 31 μg, 32 μg, 33 μg, 34 μg, 35 μg, 36 μg, 37 μg, 38 μg, 39 μg, 40 μg, 41 μg, 42 μg, 43 μg, 44 μg, 45 μg, 46 μg, 47 μg, 48 μg, 49 μg, 50 μg, 51 μg, 52 μg, 53 μg, 54 μg, 55 μg, 56 μg, 57 μg, 58 μg, 59 μg, 60 μg, 61 μg, 62 μg, 63 μg, 64 μg, 65 μg, 66 μg, 67 μg, 68 μg, 69 μg, 70 μg, 71 μg, 72 μg, 73 μg, 74 μg, 75 μg, 76 μg, 77 μg, 78 μg, 79 μg, 80 μg, 81 μg, 82 μg, 83 μg, 84 μg, 85 μg, 86 μg, 87 μg, 88 μg, 89 μg, 90 μg, 91 μg, 92 μg, 93 μg, 94 μg, 95 μg, 96 μg, 97 μg, 98 μg, 99 μg, 100 μg, 101 μg, 102 μg, 103 μg, 104 μg, 105 μg, 106 μg, 107 μg, 108 μg, 109 μg, 110 μg, 111 μg, 112 μg, 113 μg, 114 μg, 115 μg, 116 μg, 117 μg, 118 μg, 119 μg, or 120 μg; from 15 μg to: 16 μg, 17 μg, 18 μg, 19 μg, 20 μg, 21 μg, 22 μg, 23 μg, 24 μg, 25 μg, 26 μg, 27 μg, 28 μg, 29 μg, 30 μg, 31 μg, 32 μg, 33 μg, 34 μg, 35 μg, 36 μg, 37 μg, 38 μg, 39 μg, 40 μg, 41 μg, 42 μg, 43 μg, 44 μg, 45 μg, 46 μg, 47 μg, 48 μg, 49 μg, 50 μg, 51 μg, 52 μg, 53 μg, 54 μg, 55 μg, 56 μg, 57 μg, 58 μg, 59 μg, 60 μg, 61 μg, 62 μg, 63 μg, 64 μg, 65 μg, 66 μg, 67 μg, 68 μg, 69 μg, 70 μg, 71 μg, 72 μg, 73 μg, 74 μg, 75 μg, 76 μg, 77 μg, 78 μg, 79 μg, 80 μg, 81 μg, 82 μg, 83 μg, 84 μg, 85 μg, 86 μg, 87 μg, 88 μg, 89 μg, 90 μg, 91 μg, 92 μg, 93 μg, 94 μg, 95 μg, 96 μg, 97 μg, 98 μg, 99 μg, 100 μg, 101 μg, 102 μg, 103 μg, 104 μg, 105 μg, 106 μg, 107 μg, 108 μg, 109 μg, 110 μg, 111 μg, 112 μg, 113 μg, 114 μg, 115 μg, 116 μg, 117 μg, 118 μg, 119 μg, or 120 μg; from 16 μg to: 17 μg, 18 μg, 19 μg, 20 μg, 21 μg, 22 μg, 23 μg, 24 μg, 25 μg, 26 μg, 27 μg, 28 μg, 29 μg, 30 μg, 31 μg, 32 μg, 33 μg, 34 μg, 35 μg, 36 μg, 37 μg, 38 μg, 39 μg, 40 μg, 41 μg, 42 μg, 43 μg, 44 μg, 45 μg, 46 μg, 47 μg, 48 μg, 49 μg, 50 μg, 51 μg, 52 μg, 53 μg, 54 μg, 55 μg, 56 μg, 57 μg, 58 μg, 59 μg, 60 μg, 61 μg, 62 μg, 63 μg, 64 μg, 65 μg, 66 μg, 67 μg, 68 μg, 69 μg, 70 μg, 71 μg, 72 μg, 73 μg, 74 μg, 75 μg, 76 μg, 77 μg, 78 μg, 79 μg, 80 μg, 81 μg, 82 μg, 83 μg, 84 μg, 85 μg, 86 μg, 87 μg, 88 μg, 89 μg, 90 μg, 91 μg, 92 μg, 93 μg, 94 μg, 95 μg, 96 μg, 97 μg, 98 μg, 99 μg, 100 μg, 101 μg, 102 μg, 103 μg, 104 μg, 105 μg, 106 μg, 107 μg, 108 μg, 109 μg, 110 μg, 111 μg, 112 μg, 113 μg, 114 μg, 115 μg, 116 μg, 117 μg, 118 μg, 119 μg, or 120 μg; from 17 μg to: 18 μg, 19 μg, 20 μg, 21 μg, 22 μg, 23 μg, 24 μg, 25 μg, 26 μg, 27 μg, 28 μg, 29 μg, 30 μg, 31 μg, 32 μg, 33 μg, 34 μg, 35 μg, 36 μg, 37 μg, 38 μg, 39 μg, 40 μg, 41 μg, 42 μg, 43 μg, 44 μg, 45 μg, 46 μg, 47 μg, 48 μg, 49 μg, 50 μg, 51 μg, 52 μg, 53 μg, 54 μg, 55 μg, 56 μg, 57 μg, 58 μg, 59 μg, 60 μg, 61 μg, 62 μg, 63 μg, 64 μg, 65 μg, 66 μg, 67 μg, 68 μg, 69 μg, 70 μg, 71 μg, 72 μg, 73 μg, 74 μg, 75 μg, 76 μg, 77 μg, 78 μg, 79 μg, 80 μg, 81 μg, 82 μg, 83 μg, 84 μg, 85 μg, 86 μg, 87 μg, 88 μg, 89 μg, 90 μg, 91 μg, 92 μg, 93 μg, 94 μg, 95 μg, 96 μg, 97 μg, 98 μg, 99 μg, 100 μg, 101 μg, 102 μg, 103 μg, 104 μg, 105 μg, 106 μg, 107 μg, 108 μg, 109 μg, 110 μg, 111 μg, 112 μg, 113 μg, 114 μg, 115 μg, 116 μg, 117 μg, 118 μg, 119 μg, or 120 μg; from 18 μg to: 19 μg, 20 μg, 21 μg, 22 μg, 23 μg, 24 μg, 25 μg, 26 μg, 27 μg, 28 μg, 29 μg, 30 μg, 31 μg, 32 μg, 33 μg, 34 μg, 35 μg, 36 μg, 37 μg, 38 μg, 39 μg, 40 μg, 41 μg, 42 μg, 43 μg, 44 μg, 45 μg, 46 μg, 47 μg, 48 μg, 49 μg, 50 μg, 51 μg, 52 μg, 53 μg, 54 μg, 55 μg, 56 μg, 57 μg, 58 μg, 59 μg, 60 μg, 61 μg, 62 μg, 63 μg, 64 μg, 65 μg, 66 μg, 67 μg, 68 μg, 69 μg, 70 μg, 71 μg, 72 μg, 73 μg, 74 μg, 75 μg, 76 μg, 77 μg, 78 μg, 79 μg, 80 μg, 81 μg, 82 μg, 83 μg, 84 μg, 85 μg, 86 μg, 87 μg, 88 μg, 89 μg, 90 μg, 91 μg, 92 μg, 93 μg, 94 μg, 95 μg, 96 μg, 97 μg, 98 μg, 99 μg, 100 μg, 101 μg, 102 μg, 103 μg, 104 μg, 105 μg, 106 μg, 107 μg, 108 μg, 109 μg, 110 μg, 111 μg, 112 μg, 113 μg, 114 μg, 115 μg, 116 μg, 117 μg, 118 μg, 119 μg, or 120 μg; from 19 μg to: 20 μg, 21 μg, 22 μg, 23 μg, 24 μg, 25 μg, 26 μg, 27 μg, 28 μg, 29 μg, 30 μg, 31 μg, 32 μg, 33 μg, 34 μg, 35 μg, 36 μg, 37 μg, 38 μg, 39 μg, 40 μg, 41 μg, 42 μg, 43 μg, 44 μg, 45 μg, 46 μg, 47 μg, 48 μg, 49 μg, 50 μg, 51 μg, 52 μg, 53 μg, 54 μg, 55 μg, 56 μg, 57 μg, 58 μg, 59 μg, 60 μg, 61 μg, 62 μg, 63 μg, 64 μg, 65 μg, 66 μg, 67 μg, 68 μg, 69 μg, 70 μg, 71 μg, 72 μg, 73 μg, 74 μg, 75 μg, 76 μg, 77 μg, 78 μg, 79 μg, 80 μg, 81 μg, 82 μg, 83 μg, 84 μg, 85 μg, 86 μg, 87 μg, 88 μg, 89 μg, 90 μg, 91 μg, 92 μg, 93 μg, 94 μg, 95 μg, 96 μg, 97 μg, 98 μg, 99 μg, 100 μg, 101 μg, 102 μg, 103 μg, 104 μg, 105 μg, 106 μg, 107 μg, 108 μg, 109 μg, 110 μg, 111 μg, 112 μg, 113 μg, 114 μg, 115 μg, 116 μg, 117 μg, 118 μg, 119 μg, or 120 μg; from 20 μg to: 21 μg, 22 μg, 23 μg, 24 μg, 25 μg, 26 μg, 27 μg, 28 μg, 29 μg, 30 μg, 31 μg, 32 μg, 33 μg, 34 μg, 35 μg, 36 μg, 37 μg, 38 μg, 39 μg, 40 μg, 41 μg, 42 μg, 43 μg, 44 μg, 45 μg, 46 μg, 47 μg, 48 μg, 49 μg, 50 μg, 51 μg, 52 μg, 53 μg, 54 μg, 55 μg, 56 μg, 57 μg, 58 μg, 59 μg, 60 μg, 61 μg, 62 μg, 63 μg, 64 μg, 65 μg, 66 μg, 67 μg, 68 μg, 69 μg, 70 μg, 71 μg, 72 μg, 73 μg, 74 μg, 75 μg, 76 μg, 77 μg, 78 μg, 79 μg, 80 μg, 81 μg, 82 μg, 83 μg, 84 μg, 85 μg, 86 μg, 87 μg, 88 μg, 89 μg, 90 μg, 91 μg, 92 μg, 93 μg, 94 μg, 95 μg, 96 μg, 97 μg, 98 μg, 99 μg, 100 μg, 101 μg, 102 μg, 103 μg, 104 μg, 105 μg, 106 μg, 107 μg, 108 μg, 109 μg, 110 μg, 111 μg, 112 μg, 113 μg, 114 μg, 115 μg, 116 μg, 117 μg, 118 μg, 119 μg, or 120 μg; from 21 μg to: 22 μg, 23 μg, 24 μg, 25 μg, 26 μg, 27 μg, 28 μg, 29 μg, 30 μg, 31 μg, 32 μg, 33 μg, 34 μg, 35 μg, 36 μg, 37 μg, 38 μg, 39 μg, 40 μg, 41 μg, 42 μg, 43 μg, 44 μg, 45 μg, 46 μg, 47 μg, 48 μg, 49 μg, 50 μg, 51 μg, 52 μg, 53 μg, 54 μg, 55 μg, 56 μg, 57 μg, 58 μg, 59 μg, 60 μg, 61 μg, 62 μg, 63 μg, 64 μg, 65 μg, 66 μg, 67 μg, 68 μg, 69 μg, 70 μg, 71 μg, 72 μg, 73 μg, 74 μg, 75 μg, 76 μg, 77 μg, 78 μg, 79 μg, 80 μg, 81 μg, 82 μg, 83 μg, 84 μg, 85 μg, 86 μg, 87 μg, 88 μg, 89 μg, 90 μg, 91 μg, 92 μg, 93 μg, 94 μg, 95 μg, 96 μg, 97 μg, 98 μg, 99 μg, 100 μg, 101 μg, 102 μg, 103 μg, 104 μg, 105 μg, 106 μg, 107 μg, 108 μg, 109 μg, 110 μg, 111 μg, 112 μg, 113 μg, 114 μg, 115 μg, 116 μg, 117 μg, 118 μg, 119 μg, or 120 μg; from 22 μg to: 23 μg, 24 μg, 25 μg, 26 μg, 27 μg, 28 μg, 29 μg, 30 μg, 31 μg, 32 μg, 33 μg, 34 μg, 35 μg, 36 μg, 37 μg, 38 μg, 39 μg, 40 μg, 41 μg, 42 μg, 43 μg, 44 μg, 45 μg, 46 μg, 47 μg, 48 μg, 49 μg, 50 μg, 51 μg, 52 μg, 53 μg, 54 μg, 55 μg, 56 μg, 57 μg, 58 μg, 59 μg, 60 μg, 61 μg, 62 μg, 63 μg, 64 μg, 65 μg, 66 μg, 67 μg, 68 μg, 69 μg, 70 μg, 71 μg, 72 μg, 73 μg, 74 μg, 75 μg, 76 μg, 77 μg, 78 μg, 79 μg, 80 μg, 81 μg, 82 μg, 83 μg, 84 μg, 85 μg, 86 μg, 87 μg, 88 μg, 89 μg, 90 μg, 91 μg, 92 μg, 93 μg, 94 μg, 95 μg, 96 μg, 97 μg, 98 μg, 99 μg, 100 μg, 101 μg, 102 μg, 103 μg, 104 μg, 105 μg, 106 μg, 107 μg, 108 μg, 109 μg, 110 μg, 111 μg, 112 μg, 113 μg, 114 μg, 115 μg, 116 μg, 117 μg, 118 μg, 119 μg, or 120 μg; from 23 μg to: 24 μg, 25 μg, 26 μg, 27 μg, 28 μg, 29 μg, 30 μg, 31 μg, 32 μg, 33 μg, 34 μg, 35 μg, 36 μg, 37 μg, 38 μg, 39 μg, 40 μg, 41 μg, 42 μg, 43 μg, 44 μg, 45 μg, 46 μg, 47 μg, 48 μg, 49 μg, 50 μg, 51 μg, 52 μg, 53 μg, 54 μg, 55 μg, 56 μg, 57 μg, 58 μg, 59 μg, 60 μg, 61 μg, 62 μg, 63 μg, 64 μg, 65 μg, 66 μg, 67 μg, 68 μg, 69 μg, 70 μg, 71 μg, 72 μg, 73 μg, 74 μg, 75 μg, 76 μg, 77 μg, 78 μg, 79 μg, 80 μg, 81 μg, 82 μg, 83 μg, 84 μg, 85 μg, 86 μg, 87 μg, 88 μg, 89 μg, 90 μg, 91 μg, 92 μg, 93 μg, 94 μg, 95 μg, 96 μg, 97 μg, 98 μg, 99 μg, 100 μg, 101 μg, 102 μg, 103 μg, 104 μg, 105 μg, 106 μg, 107 μg, 108 μg, 109 μg, 110 μg, 111 μg, 112 μg, 113 μg, 114 μg, 115 μg, 116 μg, 117 μg, 118 μg, 119 μg, or 120 μg; from 24 μg to: 25 μg, 26 μg, 27 μg, 28 μg, 29 μg, 30 μg, 31 μg, 32 μg, 33 μg, 34 μg, 35 μg, 36 μg, 37 μg, 38 μg, 39 μg, 40 μg, 41 μg, 42 μg, 43 μg, 44 μg, 45 μg, 46 μg, 47 μg, 48 μg, 49 μg, 50 μg, 51 μg, 52 μg, 53 μg, 54 μg, 55 μg, 56 μg, 57 μg, 58 μg, 59 μg, 60 μg, 61 μg, 62 μg, 63 μg, 64 μg, 65 μg, 66 μg, 67 μg, 68 μg, 69 μg, 70 μg, 71 μg, 72 μg, 73 μg, 74 μg, 75 μg, 76 μg, 77 μg, 78 μg, 79 μg, 80 μg, 81 μg, 82 μg, 83 μg, 84 μg, 85 μg, 86 μg, 87 μg, 88 μg, 89 μg, 90 μg, 91 μg, 92 μg, 93 μg, 94 μg, 95 μg, 96 μg, 97 μg, 98 μg, 99 μg, 100 μg, 101 μg, 102 μg, 103 μg, 104 μg, 105 μg, 106 μg, 107 μg, 108 μg, 109 μg, 110 μg, 111 μg, 112 μg, 113 μg, 114 μg, 115 μg, 116 μg, 117 μg, 118 μg, 119 μg, or 120 μg; from 25 μg to: 26 μg, 27 μg, 28 μg, 29 μg, 30 μg, 31 μg, 32 μg, 33 μg, 34 μg, 35 μg, 36 μg, 37 μg, 38 μg, 39 μg, 40 μg, 41 μg, 42 μg, 43 μg, 44 μg, 45 μg, 46 μg, 47 μg, 48 μg, 49 μg, 50 μg, 51 μg, 52 μg, 53 μg, 54 μg, 55 μg, 56 μg, 57 μg, 58 μg, 59 μg, 60 μg, 61 μg, 62 μg, 63 μg, 64 μg, 65 μg, 66 μg, 67 μg, 68 μg, 69 μg, 70 μg, 71 μg, 72 μg, 73 μg, 74 μg, 75 μg, 76 μg, 77 μg, 78 μg, 79 μg, 80 μg, 81 μg, 82 μg, 83 μg, 84 μg, 85 μg, 86 μg, 87 μg, 88 μg, 89 μg, 90 μg, 91 μg, 92 μg, 93 μg, 94 μg, 95 μg, 96 μg, 97 μg, 98 μg, 99 μg, 100 μg, 101 μg, 102 μg, 103 μg, 104 μg, 105 μg, 106 μg, 107 μg, 108 μg, 109 μg, 110 μg, 111 μg, 112 μg, 113 μg, 114 μg, 115 μg, 116 μg, 117 μg, 118 μg, 119 μg, or 120 μg; from 26 μg to: 27 μg, 28 μg, 29 μg, 30 μg, 31 μg, 32 μg, 33 μg, 34 μg, 35 μg, 36 μg, 37 μg, 38 μg, 39 μg, 40 μg, 41 μg, 42 μg, 43 μg, 44 μg, 45 μg, 46 μg, 47 μg, 48 μg, 49 μg, 50 μg, 51 μg, 52 μg, 53 μg, 54 μg, 55 μg, 56 μg, 57 μg, 58 μg, 59 μg, 60 μg, 61 μg, 62 μg, 63 μg, 64 μg, 65 μg, 66 μg, 67 μg, 68 μg, 69 μg, 70 μg, 71 μg, 72 μg, 73 μg, 74 μg, 75 μg, 76 μg, 77 μg, 78 μg, 79 μg, 80 μg, 81 μg, 82 μg, 83 μg, 84 μg, 85 μg, 86 μg, 87 μg, 88 μg, 89 μg, 90 μg, 91 μg, 92 μg, 93 μg, 94 μg, 95 μg, 96 μg, 97 μg, 98 μg, 99 μg, 100 μg, 101 μg, 102 μg, 103 μg, 104 μg, 105 μg, 106 μg, 107 μg, 108 μg, 109 μg, 110 μg, 111 μg, 112 μg, 113 μg, 114 μg, 115 μg, 116 μg, 117 μg, 118 μg, 119 μg, or 120 μg; from 27 μg to: 28 μg, 29 μg, 30 μg, 31 μg, 32 μg, 33 μg, 34 μg, 35 μg, 36 μg, 37 μg, 38 μg, 39 μg, 40 μg, 41 μg, 42 μg, 43 μg, 44 μg, 45 μg, 46 μg, 47 μg, 48 μg, 49 μg, 50 μg, 51 μg, 52 μg, 53 μg, 54 μg, 55 μg, 56 μg, 57 μg, 58 μg, 59 μg, 60 μg, 61 μg, 62 μg, 63 μg, 64 μg, 65 μg, 66 μg, 67 μg, 68 μg, 69 μg, 70 μg, 71 μg, 72 μg, 73 μg, 74 μg, 75 μg, 76 μg, 77 μg, 78 μg, 79 μg, 80 μg, 81 μg, 82 μg, 83 μg, 84 μg, 85 μg, 86 μg, 87 μg, 88 μg, 89 μg, 90 μg, 91 μg, 92 μg, 93 μg, 94 μg, 95 μg, 96 μg, 97 μg, 98 μg, 99 μg, 100 μg, 101 μg, 102 μg, 103 μg, 104 μg, 105 μg, 106 μg, 107 μg, 108 μg, 109 μg, 110 μg, 111 μg, 112 μg, 113 μg, 114 μg, 115 μg, 116 μg, 117 μg, 118 μg, 119 μg, or 120 μg; from 28 μg to: 29 μg, 30 μg, 31 μg, 32 μg, 33 μg, 34 μg, 35 μg, 36 μg, 37 μg, 38 μg, 39 μg, 40 μg, 41 μg, 42 μg, 43 μg, 44 μg, 45 μg, 46 μg, 47 μg, 48 μg, 49 μg, 50 μg, 51 μg, 52 μg, 53 μg, 54 μg, 55 μg, 56 μg, 57 μg, 58 μg, 59 μg, 60 μg, 61 μg, 62 μg, 63 μg, 64 μg, 65 μg, 66 μg, 67 μg, 68 μg, 69 μg, 70 μg, 71 μg, 72 μg, 73 μg, 74 μg, 75 μg, 76 μg, 77 μg, 78 μg, 79 μg, 80 μg, 81 μg, 82 μg, 83 μg, 84 μg, 85 μg, 86 μg, 87 μg, 88 μg, 89 μg, 90 μg, 91 μg, 92 μg, 93 μg, 94 μg, 95 μg, 96 μg, 97 μg, 98 μg, 99 μg, 100 μg, 101 μg, 102 μg, 103 μg, 104 μg, 105 μg, 106 μg, 107 μg, 108 μg, 109 μg, 110 μg, 111 μg, 112 μg, 113 μg, 114 μg, 115 μg, 116 μg, 117 μg, 118 μg, 119 μg, or 120 μg; from 29 μg to: 30 μg, 31 μg, 32 μg, 33 μg, 34 μg, 35 μg, 36 μg, 37 μg, 38 μg, 39 μg, 40 μg, 41 μg, 42 μg, 43 μg, 44 μg, 45 μg, 46 μg, 47 μg, 48 μg, 49 μg, 50 μg, 51 μg, 52 μg, 53 μg, 54 μg, 55 μg, 56 μg, 57 μg, 58 μg, 59 μg, 60 μg, 61 μg, 62 μg, 63 μg, 64 μg, 65 μg, 66 μg, 67 μg, 68 μg, 69 μg, 70 μg, 71 μg, 72 μg, 73 μg, 74 μg, 75 μg, 76 μg, 77 μg, 78 μg, 79 μg, 80 μg, 81 μg, 82 μg, 83 μg, 84 μg, 85 μg, 86 μg, 87 μg, 88 μg, 89 μg, 90 μg, 91 μg, 92 μg, 93 μg, 94 μg, 95 μg, 96 μg, 97 μg, 98 μg, 99 μg, 100 μg, 101 μg, 102 μg, 103 μg, 104 μg, 105 μg, 106 μg, 107 μg, 108 μg, 109 μg, 110 μg, 111 μg, 112 μg, 113 μg, 114 μg, 115 μg, 116 μg, 117 μg, 118 μg, 119 μg, or 120 μg; from 30 μg to: 31 μg, 32 μg, 33 μg, 34 μg, 35 μg, 36 μg, 37 μg, 38 μg, 39 μg, 40 μg, 41 μg, 42 μg, 43 μg, 44 μg, 45 μg, 46 μg, 47 μg, 48 μg, 49 μg, 50 μg, 51 μg, 52 μg, 53 μg, 54 μg, 55 μg, 56 μg, 57 μg, 58 μg, 59 μg, 60 μg, 61 μg, 62 μg, 63 μg, 64 μg, 65 μg, 66 μg, 67 μg, 68 μg, 69 μg, 70 μg, 71 μg, 72 μg, 73 μg, 74 μg, 75 μg, 76 μg, 77 μg, 78 μg, 79 μg, 80 μg, 81 μg, 82 μg, 83 μg, 84 μg, 85 μg, 86 μg, 87 μg, 88 μg, 89 μg, 90 μg, 91 μg, 92 μg, 93 μg, 94 μg, 95 μg, 96 μg, 97 μg, 98 μg, 99 μg, 100 μg, 101 μg, 102 μg, 103 μg, 104 μg, 105 μg, 106 μg, 107 μg, 108 μg, 109 μg, 110 μg, 111 μg, 112 μg, 113 μg, 114 μg, 115 μg, 116 μg, 117 μg, 118 μg, 119 μg, or 120 μg; from 31 μg to: 32 μg, 33 μg, 34 μg, 35 μg, 36 μg, 37 μg, 38 μg, 39 μg, 40 μg, 41 μg, 42 μg, 43 μg, 44 μg, 45 μg, 46 μg, 47 μg, 48 μg, 49 μg, 50 μg, 51 μg, 52 μg, 53 μg, 54 μg, 55 μg, 56 μg, 57 μg, 58 μg, 59 μg, 60 μg, 61 μg, 62 μg, 63 μg, 64 μg, 65 μg, 66 μg, 67 μg, 68 μg, 69 μg, 70 μg, 71 μg, 72 μg, 73 μg, 74 μg, 75 μg, 76 μg, 77 μg, 78 μg, 79 μg, 80 μg, 81 μg, 82 μg, 83 μg, 84 μg, 85 μg, 86 μg, 87 μg, 88 μg, 89 μg, 90 μg, 91 μg, 92 μg, 93 μg, 94 μg, 95 μg, 96 μg, 97 μg, 98 μg, 99 μg, 100 μg, 101 μg, 102 μg, 103 μg, 104 μg, 105 μg, 106 μg, 107 μg, 108 μg, 109 μg, 110 μg, 111 μg, 112 μg, 113 μg, 114 μg, 115 μg, 116 μg, 117 μg, 118 μg, 119 μg, or 120 μg; from 32 μg to: 33 μg, 34 μg, 35 μg, 36 μg, 37 μg, 38 μg, 39 μg, 40 μg, 41 μg, 42 μg, 43 μg, 44 μg, 45 μg, 46 μg, 47 μg, 48 μg, 49 μg, 50 μg, 51 μg, 52 μg, 53 μg, 54 μg, 55 μg, 56 μg, 57 μg, 58 μg, 59 μg, 60 μg, 61 μg, 62 μg, 63 μg, 64 μg, 65 μg, 66 μg, 67 μg, 68 μg, 69 μg, 70 μg, 71 μg, 72 μg, 73 μg, 74 μg, 75 μg, 76 μg, 77 μg, 78 μg, 79 μg, 80 μg, 81 μg, 82 μg, 83 μg, 84 μg, 85 μg, 86 μg, 87 μg, 88 μg, 89 μg, 90 μg, 91 μg, 92 μg, 93 μg, 94 μg, 95 μg, 96 μg, 97 μg, 98 μg, 99 μg, 100 μg, 101 μg, 102 μg, 103 μg, 104 μg, 105 μg, 106 μg, 107 μg, 108 μg, 109 μg, 110 μg, 111 μg, 112 μg, 113 μg, 114 μg, 115 μg, 116 μg, 117 μg, 118 μg, 119 μg, or 120 μg; from 33 μg to: 34 μg, 35 μg, 36 μg, 37 μg, 38 μg, 39 μg, 40 μg, 41 μg, 42 μg, 43 μg, 44 μg, 45 μg, 46 μg, 47 μg, 48 μg, 49 μg, 50 μg, 51 μg, 52 μg, 53 μg, 54 μg, 55 μg, 56 μg, 57 μg, 58 μg, 59 μg, 60 μg, 61 μg, 62 μg, 63 μg, 64 μg, 65 μg, 66 μg, 67 μg, 68 μg, 69 μg, 70 μg, 71 μg, 72 μg, 73 μg, 74 μg, 75 μg, 76 μg, 77 μg, 78 μg, 79 μg, 80 μg, 81 μg, 82 μg, 83 μg, 84 μg, 85 μg, 86 μg, 87 μg, 88 μg, 89 μg, 90 μg, 91 μg, 92 μg, 93 μg, 94 μg, 95 μg, 96 μg, 97 μg, 98 μg, 99 μg, 100 μg, 101 μg, 102 μg, 103 μg, 104 μg, 105 μg, 106 μg, 107 μg, 108 μg, 109 μg, 110 μg, 111 μg, 112 μg, 113 μg, 114 μg, 115 μg, 116 μg, 117 μg, 118 μg, 119 μg, or 120 μg; from 34 μg to: 35 μg, 36 μg, 37 μg, 38 μg, 39 μg, 40 μg, 41 μg, 42 μg, 43 μg, 44 μg, 45 μg, 46 μg, 47 μg, 48 μg, 49 μg, 50 μg, 51 μg, 52 μg, 53 μg, 54 μg, 55 μg, 56 μg, 57 μg, 58 μg, 59 μg, 60 μg, 61 μg, 62 μg, 63 μg, 64 μg, 65 μg, 66 μg, 67 μg, 68 μg, 69 μg, 70 μg, 71 μg, 72 μg, 73 μg, 74 μg, 75 μg, 76 μg, 77 μg, 78 μg, 79 μg, 80 μg, 81 μg, 82 μg, 83 μg, 84 μg, 85 μg, 86 μg, 87 μg, 88 μg, 89 μg, 90 μg, 91 μg, 92 μg, 93 μg, 94 μg, 95 μg, 96 μg, 97 μg, 98 μg, 99 μg, 100 μg, 101 μg, 102 μg, 103 μg, 104 μg, 105 μg, 106 μg, 107 μg, 108 μg, 109 μg, 110 μg, 111 μg, 112 μg, 113 μg, 114 μg, 115 μg, 116 μg, 117 μg, 118 μg, 119 μg, or 120 μg; from 35 μg to: 36 μg, 37 μg, 38 μg, 39 μg, 40 μg, 41 μg, 42 μg, 43 μg, 44 μg, 45 μg, 46 μg, 47 μg, 48 μg, 49 μg, 50 μg, 51 μg, 52 μg, 53 μg, 54 μg, 55 μg, 56 μg, 57 μg, 58 μg, 59 μg, 60 μg, 61 μg, 62 μg, 63 μg, 64 μg, 65 μg, 66 μg, 67 μg, 68 μg, 69 μg, 70 μg, 71 μg, 72 μg, 73 μg, 74 μg, 75 μg, 76 μg, 77 μg, 78 μg, 79 μg, 80 μg, 81 μg, 82 μg, 83 μg, 84 μg, 85 μg, 86 μg, 87 μg, 88 μg, 89 μg, 90 μg, 91 μg, 92 μg, 93 μg, 94 μg, 95 μg, 96 μg, 97 μg, 98 μg, 99 μg, 100 μg, 101 μg, 102 μg, 103 μg, 104 μg, 105 μg, 106 μg, 107 μg, 108 μg, 109 μg, 110 μg, 111 μg, 112 μg, 113 μg, 114 μg, 115 μg, 116 μg, 117 μg, 118 μg, 119 μg, or 120 μg; from 36 μg to: 37 μg, 38 μg, 39 μg, 40 μg, 41 μg, 42 μg, 43 μg, 44 μg, 45 μg, 46 μg, 47 μg, 48 μg, 49 μg, 50 μg, 51 μg, 52 μg, 53 μg, 54 μg, 55 μg, 56 μg, 57 μg, 58 μg, 59 μg, 60 μg, 61 μg, 62 μg, 63 μg, 64 μg, 65 μg, 66 μg, 67 μg, 68 μg, 69 μg, 70 μg, 71 μg, 72 μg, 73 μg, 74 μg, 75 μg, 76 μg, 77 μg, 78 μg, 79 μg, 80 μg, 81 μg, 82 μg, 83 μg, 84 μg, 85 μg, 86 μg, 87 μg, 88 μg, 89 μg, 90 μg, 91 μg, 92 μg, 93 μg, 94 μg, 95 μg, 96 μg, 97 μg, 98 μg, 99 μg, 100 μg, 101 μg, 102 μg, 103 μg, 104 μg, 105 μg, 106 μg, 107 μg, 108 μg, 109 μg, 110 μg, 111 μg, 112 μg, 113 μg, 114 μg, 115 μg, 116 μg, 117 μg, 118 μg, 119 μg, or 120 μg; from 37 μg to: 38 μg, 39 μg, 40 μg, 41 μg, 42 μg, 43 μg, 44 μg, 45 μg, 46 μg, 47 μg, 48 μg, 49 μg, 50 μg, 51 μg, 52 μg, 53 μg, 54 μg, 55 μg, 56 μg, 57 μg, 58 μg, 59 μg, 60 μg, 61 μg, 62 μg, 63 μg, 64 μg, 65 μg, 66 μg, 67 μg, 68 μg, 69 μg, 70 μg, 71 μg, 72 μg, 73 μg, 74 μg, 75 μg, 76 μg, 77 μg, 78 μg, 79 μg, 80 μg, 81 μg, 82 μg, 83 μg, 84 μg, 85 μg, 86 μg, 87 μg, 88 μg, 89 μg, 90 μg, 91 μg, 92 μg, 93 μg, 94 μg, 95 μg, 96 μg, 97 μg, 98 μg, 99 μg, 100 μg, 101 μg, 102 μg, 103 μg, 104 μg, 105 μg, 106 μg, 107 μg, 108 μg, 109 μg, 110 μg, 111 μg, 112 μg, 113 μg, 114 μg, 115 μg, 116 μg, 117 μg, 118 μg, 119 μg, or 120 μg; from 38 μg to: 39 μg, 40 μg, 41 μg, 42 μg, 43 μg, 44 μg, 45 μg, 46 μg, 47 μg, 48 μg, 49 μg, 50 μg, 51 μg, 52 μg, 53 μg, 54 μg, 55 μg, 56 μg, 57 μg, 58 μg, 59 μg, 60 μg, 61 μg, 62 μg, 63 μg, 64 μg, 65 μg, 66 μg, 67 μg, 68 μg, 69 μg, 70 μg, 71 μg, 72 μg, 73 μg, 74 μg, 75 μg, 76 μg, 77 μg, 78 μg, 79 μg, 80 μg, 81 μg, 82 μg, 83 μg, 84 μg, 85 μg, 86 μg, 87 μg, 88 μg, 89 μg, 90 μg, 91 μg, 92 μg, 93 μg, 94 μg, 95 μg, 96 μg, 97 μg, 98 μg, 99 μg, 100 μg, 101 μg, 102 μg, 103 μg, 104 μg, 105 μg, 106 μg, 107 μg, 108 μg, 109 μg, 110 μg, 111 μg, 112 μg, 113 μg, 114 μg, 115 μg, 116 μg, 117 μg, 118 μg, 119 μg, or 120 μg; from 39 μg to: 40 μg, 41 μg, 42 μg, 43 μg, 44 μg, 45 μg, 46 μg, 47 μg, 48 μg, 49 μg, 50 μg, 51 μg, 52 μg, 53 μg, 54 μg, 55 μg, 56 μg, 57 μg, 58 μg, 59 μg, 60 μg, 61 μg, 62 μg, 63 μg, 64 μg, 65 μg, 66 μg, 67 μg, 68 μg, 69 μg, 70 μg, 71 μg, 72 μg, 73 μg, 74 μg, 75 μg, 76 μg, 77 μg, 78 μg, 79 μg, 80 μg, 81 μg, 82 μg, 83 μg, 84 μg, 85 μg, 86 μg, 87 μg, 88 μg, 89 μg, 90 μg, 91 μg, 92 μg, 93 μg, 94 μg, 95 μg, 96 μg, 97 μg, 98 μg, 99 μg, 100 μg, 101 μg, 102 μg, 103 μg, 104 μg, 105 μg, 106 μg, 107 μg, 108 μg, 109 μg, 110 μg, 111 μg, 112 μg, 113 μg, 114 μg, 115 μg, 116 μg, 117 μg, 118 μg, 119 μg, or 120 μg; from 40 μg to: 41 μg, 42 μg, 43 μg, 44 μg, 45 μg, 46 μg, 47 μg, 48 μg, 49 μg, 50 μg, 51 μg, 52 μg, 53 μg, 54 μg, 55 μg, 56 μg, 57 μg, 58 μg, 59 μg, 60 μg, 61 μg, 62 μg, 63 μg, 64 μg, 65 μg, 66 μg, 67 μg, 68 μg, 69 μg, 70 μg, 71 μg, 72 μg, 73 μg, 74 μg, 75 μg, 76 μg, 77 μg, 78 μg, 79 μg, 80 μg, 81 μg, 82 μg, 83 μg, 84 μg, 85 μg, 86 μg, 87 μg, 88 μg, 89 μg, 90 μg, 91 μg, 92 μg, 93 μg, 94 μg, 95 μg, 96 μg, 97 μg, 98 μg, 99 μg, 100 μg, 101 μg, 102 μg, 103 μg, 104 μg, 105 μg, 106 μg, 107 μg, 108 μg, 109 μg, 110 μg, 111 μg, 112 μg, 113 μg, 114 μg, 115 μg, 116 μg, 117 μg, 118 μg, 119 μg, or 120 μg; from 41 μg to: 41 μg, 42 μg, 43 μg, 44 μg, 45 μg, 46 μg, 47 μg, 48 μg, 49 μg, 50 μg, 51 μg, 52 μg, 53 μg, 54 μg, 55 μg, 56 μg, 57 μg, 58 μg, 59 μg, 60 μg, 61 μg, 62 μg, 63 μg, 64 μg, 65 μg, 66 μg, 67 μg, 68 μg, 69 μg, 70 μg, 71 μg, 72 μg, 73 μg, 74 μg, 75 μg, 76 μg, 77 μg, 78 μg, 79 μg, 80 μg, 81 μg, 82 μg, 83 μg, 84 μg, 85 μg, 86 μg, 87 μg, 88 μg, 89 μg, 90 μg, 91 μg, 92 μg, 93 μg, 94 μg, 95 μg, 96 μg, 97 μg, 98 μg, 99 μg, 100 μg, 101 μg, 102 μg, 103 μg, 104 μg, 105 μg, 106 μg, 107 μg, 108 μg, 109 μg, 110 μg, 111 μg, 112 μg, 113 μg, 114 μg, 115 μg, 116 μg, 117 μg, 118 μg, 119 μg, or 120 μg; from 42 μg to: 43 μg, 44 μg, 45 μg, 46 μg, 47 μg, 48 μg, 49 μg, 50 μg, 51 μg, 52 μg, 53 μg, 54 μg, 55 μg, 56 μg, 57 μg, 58 μg, 59 μg, 60 μg, 61 μg, 62 μg, 63 μg, 64 μg, 65 μg, 66 μg, 67 μg, 68 μg, 69 μg, 70 μg, 71 μg, 72 μg, 73 μg, 74 μg, 75 μg, 76 μg, 77 μg, 78 μg, 79 μg, 80 μg, 81 μg, 82 μg, 83 μg, 84 μg, 85 μg, 86 μg, 87 μg, 88 μg, 89 μg, 90 μg, 91 μg, 92 μg, 93 μg, 94 μg, 95 μg, 96 μg, 97 μg, 98 μg, 99 μg, 100 μg, 101 μg, 102 μg, 103 μg, 104 μg, 105 μg, 106 μg, 107 μg, 108 μg, 109 μg, 110 μg, 111 μg, 112 μg, 113 μg, 114 μg, 115 μg, 116 μg, 117 μg, 118 μg, 119 μg, or 120 μg; from 43 μg to: 44 μg, 45 μg, 46 μg, 47 μg, 48 μg, 49 μg, 50 μg, 51 μg, 52 μg, 53 μg, 54 μg, 55 μg, 56 μg, 57 μg, 58 μg, 59 μg, 60 μg, 61 μg, 62 μg, 63 μg, 64 μg, 65 μg, 66 μg, 67 μg, 68 μg, 69 μg, 70 μg, 71 μg, 72 μg, 73 μg, 74 μg, 75 μg, 76 μg, 77 μg, 78 μg, 79 μg, 80 μg, 81 μg, 82 μg, 83 μg, 84 μg, 85 μg, 86 μg, 87 μg, 88 μg, 89 μg, 90 μg, 91 μg, 92 μg, 93 μg, 94 μg, 95 μg, 96 μg, 97 μg, 98 μg, 99 μg, 100 μg, 101 μg, 102 μg, 103 μg, 104 μg, 105 μg, 106 μg, 107 μg, 108 μg, 109 μg, 110 μg, 111 μg, 112 μg, 113 μg, 114 μg, 115 μg, 116 μg, 117 μg, 118 μg, 119 μg, or 120 μg; from 44 μg to: 45 μg, 46 μg, 47 μg, 48 μg, 49 μg, 50 μg, 51 μg, 52 μg, 53 μg, 54 μg, 55 μg, 56 μg, 57 μg, 58 μg, 59 μg, 60 μg, 61 μg, 62 μg, 63 μg, 64 μg, 65 μg, 66 μg, 67 μg, 68 μg, 69 μg, 70 μg, 71 μg, 72 μg, 73 μg, 74 μg, 75 μg, 76 μg, 77 μg, 78 μg, 79 μg, 80 μg, 81 μg, 82 μg, 83 μg, 84 μg, 85 μg, 86 μg, 87 μg, 88 μg, 89 μg, 90 μg, 91 μg, 92 μg, 93 μg, 94 μg, 95 μg, 96 μg, 97 μg, 98 μg, 99 μg, 100 μg, 101 μg, 102 μg, 103 μg, 104 μg, 105 μg, 106 μg, 107 μg, 108 μg, 109 μg, 110 μg, 111 μg, 112 μg, 113 μg, 114 μg, 115 μg, 116 μg, 117 μg, 118 μg, 119 μg, or 120 μg; from 45 μg to: 46 μg, 47 μg, 48 μg, 49 μg, 50 μg, 51 μg, 52 μg, 53 μg, 54 μg, 55 μg, 56 μg, 57 μg, 58 μg, 59 μg, 60 μg, 61 μg, 62 μg, 63 μg, 64 μg, 65 μg, 66 μg, 67 μg, 68 μg, 69 μg, 70 μg, 71 μg, 72 μg, 73 μg, 74 μg, 75 μg, 76 μg, 77 μg, 78 μg, 79 μg, 80 μg, 81 μg, 82 μg, 83 μg, 84 μg, 85 μg, 86 μg, 87 μg, 88 μg, 89 μg, 90 μg, 91 μg, 92 μg, 93 μg, 94 μg, 95 μg, 96 μg, 97 μg, 98 μg, 99 μg, 100 μg, 101 μg, 102 μg, 103 μg, 104 μg, 105 μg, 106 μg, 107 μg, 108 μg, 109 μg, 110 μg, 111 μg, 112 μg, 113 μg, 114 μg, 115 μg, 116 μg, 117 μg, 118 μg, 119 μg, or 120 μg; from 46 μg to: 47 μg, 48 μg, 49 μg, 50 μg, 51 μg, 52 μg, 53 μg, 54 μg, 55 μg, 56 μg, 57 μg, 58 μg, 59 μg, 60 μg, 61 μg, 62 μg, 63 μg, 64 μg, 65 μg, 66 μg, 67 μg, 68 μg, 69 μg, 70 μg, 71 μg, 72 μg, 73 μg, 74 μg, 75 μg, 76 μg, 77 μg, 78 μg, 79 μg, 80 μg, 81 μg, 82 μg, 83 μg, 84 μg, 85 μg, 86 μg, 87 μg, 88 μg, 89 μg, 90 μg, 91 μg, 92 μg, 93 μg, 94 μg, 95 μg, 96 μg, 97 μg, 98 μg, 99 μg, 100 μg, 101 μg, 102 μg, 103 μg, 104 μg, 105 μg, 106 μg, 107 μg, 108 μg, 109 μg, 110 μg, 111 μg, 112 μg, 113 μg, 114 μg, 115 μg, 116 μg, 117 μg, 118 μg, 119 μg, or 120 μg; from 47 μg to: 48 μg, 49 μg, 50 μg, 51 μg, 52 μg, 53 μg, 54 μg, 55 μg, 56 μg, 57 μg, 58 μg, 59 μg, 60 μg, 61 μg, 62 μg, 63 μg, 64 μg, 65 μg, 66 μg, 67 μg, 68 μg, 69 μg, 70 μg, 71 μg, 72 μg, 73 μg, 74 μg, 75 μg, 76 μg, 77 μg, 78 μg, 79 μg, 80 μg, 81 μg, 82 μg, 83 μg, 84 μg, 85 μg, 86 μg, 87 μg, 88 μg, 89 μg, 90 μg, 91 μg, 92 μg, 93 μg, 94 μg, 95 μg, 96 μg, 97 μg, 98 μg, 99 μg, 100 μg, 101 μg, 102 μg, 103 μg, 104 μg, 105 μg, 106 μg, 107 μg, 108 μg, 109 μg, 110 μg, 111 μg, 112 μg, 113 μg, 114 μg, 115 μg, 116 μg, 117 μg, 118 μg, 119 μg, or 120 μg; from 48 μg to: 49 μg, 50 μg, 51 μg, 52 μg, 53 μg, 54 μg, 55 μg, 56 μg, 57 μg, 58 μg, 59 μg, 60 μg, 61 μg, 62 μg, 63 μg, 64 μg, 65 μg, 66 μg, 67 μg, 68 μg, 69 μg, 70 μg, 71 μg, 72 μg, 73 μg, 74 μg, 75 μg, 76 μg, 77 μg, 78 μg, 79 μg, 80 μg, 81 μg, 82 μg, 83 μg, 84 μg, 85 μg, 86 μg, 87 μg, 88 μg, 89 μg, 90 μg, 91 μg, 92 μg, 93 μg, 94 μg, 95 μg, 96 μg, 97 μg, 98 μg, 99 μg, 100 μg, 101 μg, 102 μg, 103 μg, 104 μg, 105 μg, 106 μg, 107 μg, 108 μg, 109 μg, 110 μg, 111 μg, 112 μg, 113 μg, 114 μg, 115 μg, 116 μg, 117 μg, 118 μg, 119 μg, or 120 μg; from 49 μg to: 50 μg, 51 μg, 52 μg, 53 μg, 54 μg, 55 μg, 56 μg, 57 μg, 58 μg, 59 μg, 60 μg, 61 μg, 62 μg, 63 μg, 64 μg, 65 μg, 66 μg, 67 μg, 68 μg, 69 μg, 70 μg, 71 μg, 72 μg, 73 μg, 74 μg, 75 μg, 76 μg, 77 μg, 78 μg, 79 μg, 80 μg, 81 μg, 82 μg, 83 μg, 84 μg, 85 μg, 86 μg, 87 μg, 88 μg, 89 μg, 90 μg, 91 μg, 92 μg, 93 μg, 94 μg, 95 μg, 96 μg, 97 μg, 98 μg, 99 μg, 100 μg, 101 μg, 102 μg, 103 μg, 104 μg, 105 μg, 106 μg, 107 μg, 108 μg, 109 μg, 110 μg, 111 μg, 112 μg, 113 μg, 114 μg, 115 μg, 116 μg, 117 μg, 118 μg, 119 μg, or 120 μg; from 50 μg to: 51 μg, 52 μg, 53 μg, 54 μg, 55 μg, 56 μg, 57 μg, 58 μg, 59 μg, 60 μg, 61 μg, 62 μg, 63 μg, 64 μg, 65 μg, 66 μg, 67 μg, 68 μg, 69 μg, 70 μg, 71 μg, 72 μg, 73 μg, 74 μg, 75 μg, 76 μg, 77 μg, 78 μg, 79 μg, 80 μg, 81 μg, 82 μg, 83 μg, 84 μg, 85 μg, 86 μg, 87 μg, 88 μg, 89 μg, 90 μg, 91 μg, 92 μg, 93 μg, 94 μg, 95 μg, 96 μg, 97 μg, 98 μg, 99 μg, 100 μg, 101 μg, 102 μg, 103 μg, 104 μg, 105 μg, 106 μg, 107 μg, 108 μg, 109 μg, 110 μg, 111 μg, 112 μg, 113 μg, 114 μg, 115 μg, 116 μg, 117 μg, 118 μg, 119 μg, or 120 μg; from 51 μg to: 52 μg, 53 μg, 54 μg, 55 μg, 56 μg, 57 μg, 58 μg, 59 μg, 60 μg, 61 μg, 62 μg, 63 μg, 64 μg, 65 μg, 66 μg, 67 μg, 68 μg, 69 μg, 70 μg, 71 μg, 72 μg, 73 μg, 74 μg, 75 μg, 76 μg, 77 μg, 78 μg, 79 μg, 80 μg, 81 μg, 82 μg, 83 μg, 84 μg, 85 μg, 86 μg, 87 μg, 88 μg, 89 μg, 90 μg, 91 μg, 92 μg, 93 μg, 94 μg, 95 μg, 96 μg, 97 μg, 98 μg, 99 μg, 100 μg, 101 μg, 102 μg, 103 μg, 104 μg, 105 μg, 106 μg, 107 μg, 108 μg, 109 μg, 110 μg, 111 μg, 112 μg, 113 μg, 114 μg, 115 μg, 116 μg, 117 μg, 118 μg, 119 μg, or 120 μg; from 52 μg to: 53 μg, 54 μg, 55 μg, 56 μg, 57 μg, 58 μg, 59 μg, 60 μg, 61 μg, 62 μg, 63 μg, 64 μg, 65 μg, 66 μg, 67 μg, 68 μg, 69 μg, 70 μg, 71 μg, 72 μg, 73 μg, 74 μg, 75 μg, 76 μg, 77 μg, 78 μg, 79 μg, 80 μg, 81 μg, 82 μg, 83 μg, 84 μg, 85 μg, 86 μg, 87 μg, 88 μg, 89 μg, 90 μg, 91 μg, 92 μg, 93 μg, 94 μg, 95 μg, 96 μg, 97 μg, 98 μg, 99 μg, 100 μg, 101 μg, 102 μg, 103 μg, 104 μg, 105 μg, 106 μg, 107 μg, 108 μg, 109 μg, 110 μg, 111 μg, 112 μg, 113 μg, 114 μg, 115 μg, 116 μg, 117 μg, 118 μg, 119 μg, or 120 μg; from 53 μg to: 54 μg, 55 μg, 56 μg, 57 μg, 58 μg, 59 μg, 60 μg, 61 μg, 62 μg, 63 μg, 64 μg, 65 μg, 66 μg, 67 μg, 68 μg, 69 μg, 70 μg, 71 μg, 72 μg, 73 μg, 74 μg, 75 μg, 76 μg, 77 μg, 78 μg, 79 μg, 80 μg, 81 μg, 82 μg, 83 μg, 84 μg, 85 μg, 86 μg, 87 μg, 88 μg, 89 μg, 90 μg, 91 μg, 92 μg, 93 μg, 94 μg, 95 μg, 96 μg, 97 μg, 98 μg, 99 μg, 100 μg, 101 μg, 102 μg, 103 μg, 104 μg, 105 μg, 106 μg, 107 μg, 108 μg, 109 μg, 110 μg, 111 μg, 112 μg, 113 μg, 114 μg, 115 μg, 116 μg, 117 μg, 118 μg, 119 μg, or 120 μg; from 54 μg to: 55 μg, 56 μg, 57 μg, 58 μg, 59 μg, 60 μg, 61 μg, 62 μg, 63 μg, 64 μg, 65 μg, 66 μg, 67 μg, 68 μg, 69 μg, 70 μg, 71 μg, 72 μg, 73 μg, 74 μg, 75 μg, 76 μg, 77 μg, 78 μg, 79 μg, 80 μg, 81 μg, 82 μg, 83 μg, 84 μg, 85 μg, 86 μg, 87 μg, 88 μg, 89 μg, 90 μg, 91 μg, 92 μg, 93 μg, 94 μg, 95 μg, 96 μg, 97 μg, 98 μg, 99 μg, 100 μg, 101 μg, 102 μg, 103 μg, 104 μg, 105 μg, 106 μg, 107 μg, 108 μg, 109 μg, 110 μg, 111 μg, 112 μg, 113 μg, 114 μg, 115 μg, 116 μg, 117 μg, 118 μg, 119 μg, or 120 μg; from 55 μg to: 56 μg, 57 μg, 58 μg, 59 μg, 60 μg, 61 μg, 62 μg, 63 μg, 64 μg, 65 μg, 66 μg, 67 μg, 68 μg, 69 μg, 70 μg, 71 μg, 72 μg, 73 μg, 74 μg, 75 μg, 76 μg, 77 μg, 78 μg, 79 μg, 80 μg, 81 μg, 82 μg, 83 μg, 84 μg, 85 μg, 86 μg, 87 μg, 88 μg, 89 μg, 90 μg, 91 μg, 92 μg, 93 μg, 94 μg, 95 μg, 96 μg, 97 μg, 98 μg, 99 μg, 100 μg, 101 μg, 102 μg, 103 μg, 104 μg, 105 μg, 106 μg, 107 μg, 108 μg, 109 μg, 110 μg, 111 μg, 112 μg, 113 μg, 114 μg, 115 μg, 116 μg, 117 μg, 118 μg, 119 μg, or 120 μg; from 56 μg to: 57 μg, 58 μg, 59 μg, 60 μg, 61 μg, 62 μg, 63 μg, 64 μg, 65 μg, 66 μg, 67 μg, 68 μg, 69 μg, 70 μg, 71 μg, 72 μg, 73 μg, 74 μg, 75 μg, 76 μg, 77 μg, 78 μg, 79 μg, 80 μg, 81 μg, 82 μg, 83 μg, 84 μg, 85 μg, 86 μg, 87 μg, 88 μg, 89 μg, 90 μg, 91 μg, 92 μg, 93 μg, 94 μg, 95 μg, 96 μg, 97 μg, 98 μg, 99 μg, 100 μg, 101 μg, 102 μg, 103 μg, 104 μg, 105 μg, 106 μg, 107 μg, 108 μg, 109 μg, 110 μg, 111 μg, 112 μg, 113 μg, 114 μg, 115 μg, 116 μg, 117 μg, 118 μg, 119 μg, or 120 μg; from 57 μg to: 58 μg, 59 μg, 60 μg, 61 μg, 62 μg, 63 μg, 64 μg, 65 μg, 66 μg, 67 μg, 68 μg, 69 μg, 70 μg, 71 μg, 72 μg, 73 μg, 74 μg, 75 μg, 76 μg, 77 μg, 78 μg, 79 μg, 80 μg, 81 μg, 82 μg, 83 μg, 84 μg, 85 μg, 86 μg, 87 μg, 88 μg, 89 μg, 90 μg, 91 μg, 92 μg, 93 μg, 94 μg, 95 μg, 96 μg, 97 μg, 98 μg, 99 μg, 100 μg, 101 μg, 102 μg, 103 μg, 104 μg, 105 μg, 106 μg, 107 μg, 108 μg, 109 μg, 110 μg, 111 μg, 112 μg, 113 μg, 114 μg, 115 μg, 116 μg, 117 μg, 118 μg, 119 μg, or 120 μg; from 58 μg to: 59 μg, 60 μg, 61 μg, 62 μg, 63 μg, 64 μg, 65 μg, 66 μg, 67 μg, 68 μg, 69 μg, 70 μg, 71 μg, 72 μg, 73 μg, 74 μg, 75 μg, 76 μg, 77 μg, 78 μg, 79 μg, 80 μg, 81 μg, 82 μg, 83 μg, 84 μg, 85 μg, 86 μg, 87 μg, 88 μg, 89 μg, 90 μg, 91 μg, 92 μg, 93 μg, 94 μg, 95 μg, 96 μg, 97 μg, 98 μg, 99 μg, 100 μg, 101 μg, 102 μg, 103 μg, 104 μg, 105 μg, 106 μg, 107 μg, 108 μg, 109 μg, 110 μg, 111 μg, 112 μg, 113 μg, 114 μg, 115 μg, 116 μg, 117 μg, 118 μg, 119 μg, or 120 μg; from 59 μg to: 60 μg, 61 μg, 62 μg, 63 μg, 64 μg, 65 μg, 66 μg, 67 μg, 68 μg, 69 μg, 70 μg, 71 μg, 72 μg, 73 μg, 74 μg, 75 μg, 76 μg, 77 μg, 78 μg, 79 μg, 80 μg, 81 μg, 82 μg, 83 μg, 84 μg, 85 μg, 86 μg, 87 μg, 88 μg, 89 μg, 90 μg, 91 μg, 92 μg, 93 μg, 94 μg, 95 μg, 96 μg, 97 μg, 98 μg, 99 μg, 100 μg, 101 μg, 102 μg, 103 μg, 104 μg, 105 μg, 106 μg, 107 μg, 108 μg, 109 μg, 110 μg, 111 μg, 112 μg, 113 μg, 114 μg, 115 μg, 116 μg, 117 μg, 118 μg, 119 μg, or 120 μg; from 60 μg to: 61 μg, 62 μg, 63 μg, 64 μg, 65 μg, 66 μg, 67 μg, 68 μg, 69 μg, 70 μg, 71 μg, 72 μg, 73 μg, 74 μg, 75 μg, 76 μg, 77 μg, 78 μg, 79 μg, 80 μg, 81 μg, 82 μg, 83 μg, 84 μg, 85 μg, 86 μg, 87 μg, 88 μg, 89 μg, 90 μg, 91 μg, 92 μg, 93 μg, 94 μg, 95 μg, 96 μg, 97 μg, 98 μg, 99 μg, 100 μg, 101 μg, 102 μg, 103 μg, 104 μg, 105 μg, 106 μg, 107 μg, 108 μg, 109 μg, 110 μg, 111 μg, 112 μg, 113 μg, 114 μg, 115 μg, 116 μg, 117 μg, 118 μg, 119 μg, or 120 μg; from 61 μg to: 62 μg, 63 μg, 64 μg, 65 μg, 66 μg, 67 μg, 68 μg, 69 μg, 70 μg, 71 μg, 72 μg, 73 μg, 74 μg, 75 μg, 76 μg, 77 μg, 78 μg, 79 μg, 80 μg, 81 μg, 82 μg, 83 μg, 84 μg, 85 μg, 86 μg, 87 μg, 88 μg, 89 μg, 90 μg, 91 μg, 92 μg, 93 μg, 94 μg, 95 μg, 96 μg, 97 μg, 98 μg, 99 μg, 100 μg, 101 μg, 102 μg, 103 μg, 104 μg, 105 μg, 106 μg, 107 μg, 108 μg, 109 μg, 110 μg, 111 μg, 112 μg, 113 μg, 114 μg, 115 μg, 116 μg, 117 μg, 118 μg, 119 μg, or 120 μg; from 62 μg to: 63 μg, 64 μg, 65 μg, 66 μg, 67 μg, 68 μg, 69 μg, 70 μg, 71 μg, 72 μg, 73 μg, 74 μg, 75 μg, 76 μg, 77 μg, 78 μg, 79 μg, 80 μg, 81 μg, 82 μg, 83 μg, 84 μg, 85 μg, 86 μg, 87 μg, 88 μg, 89 μg, 90 μg, 91 μg, 92 μg, 93 μg, 94 μg, 95 μg, 96 μg, 97 μg, 98 μg, 99 μg, 100 μg, 101 μg, 102 μg, 103 μg, 104 μg, 105 μg, 106 μg, 107 μg, 108 μg, 109 μg, 110 μg, 111 μg, 112 μg, 113 μg, 114 μg, 115 μg, 116 μg, 117 μg, 118 μg, 119 μg, or 120 μg; from 63 μg to: 64 μg, 65 μg, 66 μg, 67 μg, 68 μg, 69 μg, 70 μg, 71 μg, 72 μg, 73 μg, 74 μg, 75 μg, 76 μg, 77 μg, 78 μg, 79 μg, 80 μg, 81 μg, 82 μg, 83 μg, 84 μg, 85 μg, 86 μg, 87 μg, 88 μg, 89 μg, 90 μg, 91 μg, 92 μg, 93 μg, 94 μg, 95 μg, 96 μg, 97 μg, 98 μg, 99 μg, 100 μg, 101 μg, 102 μg, 103 μg, 104 μg, 105 μg, 106 μg, 107 μg, 108 μg, 109 μg, 110 μg, 111 μg, 112 μg, 113 μg, 114 μg, 115 μg, 116 μg, 117 μg, 118 μg, 119 μg, or 120 μg; from 64 μg to: 65 μg, 66 μg, 67 μg, 68 μg, 69 μg, 70 μg, 71 μg, 72 μg, 73 μg, 74 μg, 75 μg, 76 μg, 77 μg, 78 μg, 79 μg, 80 μg, 81 μg, 82 μg, 83 μg, 84 μg, 85 μg, 86 μg, 87 μg, 88 μg, 89 μg, 90 μg, 91 μg, 92 μg, 93 μg, 94 μg, 95 μg, 96 μg, 97 μg, 98 μg, 99 μg, 100 μg, 101 μg, 102 μg, 103 μg, 104 μg, 105 μg, 106 μg, 107 μg, 108 μg, 109 μg, 110 μg, 111 μg, 112 μg, 113 μg, 114 μg, 115 μg, 116 μg, 117 μg, 118 μg, 119 μg, or 120 μg; from 65 μg to: 66 μg, 67 μg, 68 μg, 69 μg, 70 μg, 71 μg, 72 μg, 73 μg, 74 μg, 75 μg, 76 μg, 77 μg, 78 μg, 79 μg, 80 μg, 81 μg, 82 μg, 83 μg, 84 μg, 85 μg, 86 μg, 87 μg, 88 μg, 89 μg, 90 μg, 91 μg, 92 μg, 93 μg, 94 μg, 95 μg, 96 μg, 97 μg, 98 μg, 99 μg, 100 μg, 101 μg, 102 μg, 103 μg, 104 μg, 105 μg, 106 μg, 107 μg, 108 μg, 109 μg, 110 μg, 111 μg, 112 μg, 113 μg, 114 μg, 115 μg, 116 μg, 117 μg, 118 μg, 119 μg, or 120 μg; from 66 μg to: 67 μg, 68 μg, 69 μg, 70 μg, 71 μg, 72 μg, 73 μg, 74 μg, 75 μg, 76 μg, 77 μg, 78 μg, 79 μg, 80 μg, 81 μg, 82 μg, 83 μg, 84 μg, 85 μg, 86 μg, 87 μg, 88 μg, 89 μg, 90 μg, 91 μg, 92 μg, 93 μg, 94 μg, 95 μg, 96 μg, 97 μg, 98 μg, 99 μg, 100 μg, 101 μg, 102 μg, 103 μg, 104 μg, 105 μg, 106 μg, 107 μg, 108 μg, 109 μg, 110 μg, 111 μg, 112 μg, 113 μg, 114 μg, 115 μg, 116 μg, 117 μg, 118 μg, 119 μg, or 120 μg; from 67 μg to: 68 μg, 69 μg, 70 μg, 71 μg, 72 μg, 73 μg, 74 μg, 75 μg, 76 μg, 77 μg, 78 μg, 79 μg, 80 μg, 81 μg, 82 μg, 83 μg, 84 μg, 85 μg, 86 μg, 87 μg, 88 μg, 89 μg, 90 μg, 91 μg, 92 μg, 93 μg, 94 μg, 95 μg, 96 μg, 97 μg, 98 μg, 99 μg, 100 μg, 101 μg, 102 μg, 103 μg, 104 μg, 105 μg, 106 μg, 107 μg, 108 μg, 109 μg, 110 μg, 111 μg, 112 μg, 113 μg, 114 μg, 115 μg, 116 μg, 117 μg, 118 μg, 119 μg, or 120 μg; from 68 μg to: 69 μg 70 μg, 71 μg, 72 μg, 73 μg, 74 μg, 75 μg, 76 μg, 77 μg, 78 μg, 79 μg, 80 μg, 81 μg, 82 μg, 83 μg, 84 μg, 85 μg, 86 μg, 87 μg, 88 μg, 89 μg, 90 μg, 91 μg, 92 μg, 93 μg, 94 μg, 95 μg, 96 μg, 97 μg, 98 μg, 99 μg, 100 μg, 101 μg, 102 μg, 103 μg, 104 μg, 105 μg, 106 μg, 107 μg, 108 μg, 109 μg, 110 μg, 111 μg, 112 μg, 113 μg, 114 μg, 115 μg, 116 μg, 117 μg, 118 μg, 119 μg, or 120 μg; from 69 μg to: 70 μg, 71 μg, 72 μg, 73 μg, 74 μg, 75 μg, 76 μg, 77 μg, 78 μg, 79 μg, 80 μg, 81 μg, 82 μg, 83 μg, 84 μg, 85 μg, 86 μg, 87 μg, 88 μg, 89 μg, 90 μg, 91 μg, 92 μg, 93 μg, 94 μg, 95 μg, 96 μg, 97 μg, 98 μg, 99 μg, 100 μg, 101 μg, 102 μg, 103 μg, 104 μg, 105 μg, 106 μg, 107 μg, 108 μg, 109 μg, 110 μg, 111 μg, 112 μg, 113 μg, 114 μg, 115 μg, 116 μg, 117 μg, 118 μg, 119 μg, or 120 μg; from 70 μg to: 71 μg, 72 μg, 73 μg, 74 μg, 75 μg, 76 μg, 77 μg, 78 μg, 79 μg, 80 μg, 81 μg, 82 μg, 83 μg, 84 μg, 85 μg, 86 μg, 87 μg, 88 μg, 89 μg, 90 μg, 91 μg, 92 μg, 93 μg, 94 μg, 95 μg, 96 μg, 97 μg, 98 μg, 99 μg, 100 μg, 101 μg, 102 μg, 103 μg, 104 μg, 105 μg, 106 μg, 107 μg, 108 μg, 109 μg, 110 μg, 111 μg, 112 μg, 113 μg, 114 μg, 115 μg, 116 μg, 117 μg, 118 μg, 119 μg, or 120 μg; from 71 μg to: 72 μg, 73 μg, 74 μg, 75 μg, 76 μg, 77 μg, 78 μg, 79 μg, 80 μg, 81 μg, 82 μg, 83 μg, 84 μg, 85 μg, 86 μg, 87 μg, 88 μg, 89 μg, 90 μg, 91 μg, 92 μg, 93 μg, 94 μg, 95 μg, 96 μg, 97 μg, 98 μg, 99 μg, 100 μg, 101 μg, 102 μg, 103 μg, 104 μg, 105 μg, 106 μg, 107 μg, 108 μg, 109 μg, 110 μg, 111 μg, 112 μg, 113 μg, 114 μg, 115 μg, 116 μg, 117 μg, 118 μg, 119 μg, or 120 μg; from 72 μg to: 73 μg, 74 μg, 75 μg, 76 μg, 77 μg, 78 μg, 79 μg, 80 μg, 81 μg, 82 μg, 83 μg, 84 μg, 85 μg, 86 μg, 87 μg, 88 μg, 89 μg, 90 μg, 91 μg, 92 μg, 93 μg, 94 μg, 95 μg, 96 μg, 97 μg, 98 μg, 99 μg, 100 μg, 101 μg, 102 μg, 103 μg, 104 μg, 105 μg, 106 μg, 107 μg, 108 μg, 109 μg, 110 μg, 111 μg, 112 μg, 113 μg, 114 μg, 115 μg, 116 μg, 117 μg, 118 μg, 119 μg, or 120 μg; from 73 μg to: 74 μg, 75 μg, 76 μg, 77 μg, 78 μg, 79 μg, 80 μg, 81 μg, 82 μg, 83 μg, 84 μg, 85 μg, 86 μg, 87 μg, 88 μg, 89 μg, 90 μg, 91 μg, 92 μg, 93 μg, 94 μg, 95 μg, 96 μg, 97 μg, 98 μg, 99 μg, 100 μg, 101 μg, 102 μg, 103 μg, 104 μg, 105 μg, 106 μg, 107 μg, 108 μg, 109 μg, 110 μg, 111 μg, 112 μg, 113 μg, 114 μg, 115 μg, 116 μg, 117 μg, 118 μg, 119 μg, or 120 μg; from 74 μg to: 75 μg, 76 μg, 77 μg, 78 μg, 79 μg, 80 μg, 81 μg, 82 μg, 83 μg, 84 μg, 85 μg, 86 μg, 87 μg, 88 μg, 89 μg, 90 μg, 91 μg, 92 μg, 93 μg, 94 μg, 95 μg, 96 μg, 97 μg, 98 μg, 99 μg, 100 μg, 101 μg, 102 μg, 103 μg, 104 μg, 105 μg, 106 μg, 107 μg, 108 μg, 109 μg, 110 μg, 111 μg, 112 μg, 113 μg, 114 μg, 115 μg, 116 μg, 117 μg, 118 μg, 119 μg, or 120 μg; from 75 μg to: 76 μg, 77 μg, 78 μg, 79 μg, 80 μg, 81 μg, 82 μg, 83 μg, 84 μg, 85 μg, 86 μg, 87 μg, 88 μg, 89 μg, 90 μg, 91 μg, 92 μg, 93 μg, 94 μg, 95 μg, 96 μg, 97 μg, 98 μg, 99 μg, 100 μg, 101 μg, 102 μg, 103 μg, 104 μg, 105 μg, 106 μg, 107 μg, 108 μg, 109 μg, 110 μg, 111 μg, 112 μg, 113 μg, 114 μg, 115 μg, 116 μg, 117 μg, 118 μg, 119 μg, or 120 μg; from 76 μg to: 77 μg, 78 μg, 79 μg, 80 μg, 81 μg, 82 μg, 83 μg, 84 μg, 85 μg, 86 μg, 87 μg, 88 μg, 89 μg, 90 μg, 91 μg, 92 μg, 93 μg, 94 μg, 95 μg, 96 μg, 97 μg, 98 μg, 99 μg, 100 μg, 101 μg, 102 μg, 103 μg, 104 μg, 105 μg, 106 μg, 107 μg, 108 μg, 109 μg, 110 μg, 111 μg, 112 μg, 113 μg, 114 μg, 115 μg, 116 μg, 117 μg, 118 μg, 119 μg, or 120 μg; from 77 μg to: 78 μg, 79 μg, 80 μg, 81 μg, 82 μg, 83 μg, 84 μg, 85 μg, 86 μg, 87 μg, 88 μg, 89 μg, 90 μg, 91 μg, 92 μg, 93 μg, 94 μg, 95 μg, 96 μg, 97 μg, 98 μg, 99 μg, 100 μg, 101 μg, 102 μg, 103 μg, 104 μg, 105 μg, 106 μg, 107 μg, 108 μg, 109 μg, 110 μg, 111 μg, 112 μg, 113 μg, 114 μg, 115 μg, 116 μg, 117 μg, 118 μg, 119 μg, or 120 μg; from 78 μg to: 79 μg, 80 μg, 81 μg, 82 μg, 83 μg, 84 μg, 85 μg, 86 μg, 87 μg, 88 μg, 89 μg, 90 μg, 91 μg, 92 μg, 93 μg, 94 μg, 95 μg, 96 μg, 97 μg, 98 μg, 99 μg, 100 μg, 101 μg, 102 μg, 103 μg, 104 μg, 105 μg, 106 μg, 107 μg, 108 μg, 109 μg, 110 μg, 111 μg, 112 μg, 113 μg, 114 μg, 115 μg, 116 μg, 117 μg, 118 μg, 119 μg, or 120 μg; from 79 μg to: 80 μg, 81 μg, 82 μg, 83 μg, 84 μg, 85 μg, 86 μg, 87 μg, 88 μg, 89 μg, 90 μg, 91 μg, 92 μg, 93 μg, 94 μg, 95 μg, 96 μg, 97 μg, 98 μg, 99 μg, 100 μg, 101 μg, 102 μg, 103 μg, 104 μg, 105 μg, 106 μg, 107 μg, 108 μg, 109 μg, 110 μg, 111 μg, 112 μg, 113 μg, 114 μg, 115 μg, 116 μg, 117 μg, 118 μg, 119 μg, or 120 μg; from 80 μg to: 81 μg, 82 μg, 83 μg, 84 μg, 85 μg, 86 μg, 87 μg, 88 μg, 89 μg, 90 μg, 91 μg, 92 μg, 93 μg, 94 μg, 95 μg, 96 μg, 97 μg, 98 μg, 99 μg, 100 μg, 101 μg, 102 μg, 103 μg, 104 μg, 105 μg, 106 μg, 107 μg, 108 μg, 109 μg, 110 μg, 111 μg, 112 μg, 113 μg, 114 μg, 115 μg, 116 μg, 117 μg, 118 μg, 119 μg, or 120 μg of recombinant RNA molecules per primary administration.

[0493] Also contemplated and supported are combinations of primary administrations of “at least” and any of the above-noted primary administrations of “no more than” with the primary administrations provided in an Example of this document. Also contemplated and supported are combinations of the primary administrations of the Example section of this document to provide a range (i.e. the primary administration from [the primary administration from example X₁] to [the primary administration from example X₂] wherein X₁ and X₂ represent any two exemplary treatments of the Examples.

[0494] In some embodiments, the immune response that the primary administration elicits comprises a cell-mediated immune response, an antibody-response (e.g. humoral immune response), a T_{H1} immune response, or a T_{H2} immune response. In some embodiments, the eliciting of the immune response by the primary administration is from a naïve immune response where the immune system has no detectable antibody response that is against the immunogen, cell-mediated immune response that is against the immunogen, T_{H1} immune response that is against the immunogen, or a T_{H2} immune response that is against the immunogen to a cell-mediated immune response that is against the immunogen, an antibody-response (e.g. humoral immune response) that is against the immunogen, a T_{H1} immune response that is against the immunogen, or a T_{H2} immune response that is against the immunogen. In some embodiments, the eliciting of the immune response by the primary administration is from an experienced immune response where the antibody response that is against the immunogen, the cell-mediated immune response that is against the immunogen, the T_{H1} immune response that is against the immunogen, or the T_{H2} immune response that is against the immunogen is unable to reduce the likelihood of at least one symptom of the disease or from being infectious to others by the disease to a cell-mediated immune response that is against the immunogen, an antibody-response (e.g. humoral immune response) that is against the immunogen, a T_{H1} immune response that is against the immunogen, or a T_{H2} immune response that is against the immunogen that reduces the likelihood of at least one symptom of the disease or the likelihood of being infectious to others by the disease. In some embodiments, at least one symptom of the disease comprises death, respiratory distress, reduced blood oxygen, fever, chills, a febrile response, shortness of breath, difficulty breathing, fatigue, muscle aches, body aches, headaches, new or loss of smell, mucus production, sore throat, congestion, runny nose, nausea, vomiting, diarrhea, confusion, pressure in the chest, persistent pain, inability to wake, inability to stay awake, pale skin, gray skin, blue-colored skin, pale lips, gray lips, blue-colored lips, pale nail-beds, gray nail-beds, blue-colored nail-beds, low reperfusion of extremities, low reperfusion of the body, encephalitis, stroke, ischemia, fibromyalgia, or myocarditis.

[0495] In some embodiments, the above-noted methods comprise, is, or consist of more than one booster administration (i.e. two, three, four, five, six, or seven administrations). In some embodiments, the above-noted methods comprise, is, or consist of at least 2, 3, 4, 5, 6, 7, 8, 9, or 10 booster administrations (i.e. two, three, four, five, six, or seven administrations of an effective amount). In some embodiments, the above-noted methods comprise, is, or consist of no more than 15, 14, 13, 12, 11, 10, 9, 8, 7, 6, 5, 4, 3, or 2 booster administrations (i.e. two, three, four, five, six, or seven administrations of an effective amount). Taking the above-noted embodiments into account, it is contemplated and supported that any of the above-noted number of booster administrations of “at least” and “no more than” may be combined to provide an enclosed range (i.e. from 8 to 15 booster administrations). In some embodiments, the above-noted methods comprise, is, or consists of from 1 to: 2, 3, 4, 5, 6, 7, 8, 9, 10, 11, 12, 13, 14, or 15; from 2 to: 3, 4, 5, 6, 7, 8, 9, 10, 11, 12, 13, 14, or 15; 3 to: 4, 5, 6, 7, 8, 9, 10, 11, 12, 13, 14, or 15; from 4 to: 5, 6, 7, 8, 9, 10, 11, 12, 13, 14, or 15; from 5 to: 6, 7, 8, 9, 10, 11, 12, 13, 14, or 15; or from 6 to: 7, 8, 9, 10, 11, 12, 13, 14, or 15 booster administrations.

[0496] Also contemplated and supported are combinations of the number of booster administrations of “at least” and the number of booster administrations of “no more than” with the number of booster administrations provided in an Example of this document. Also contemplated and supported are combinations of the number of booster administrations of the Example section of this document to provide a range (i.e. the number of booster administrations from [the number of booster administrations from example X₁] to [number of booster administrations of example X₂] wherein X₁ and X₂ represent any two exemplary treatments of the Examples.

[0497] In some embodiments, the booster administration comprises or is at least: 0.1 μg, 1 μg, 2 μg, 3 μg, 4 μg, 5 μg, 6 μg, 7 μg, 8 μg, 9 μg, 10 μg, 11 μg, 12 μg, 13 μg, 14 μg, 15 μg, 16 μg, 17 μg, 18 μg, 19 μg, 20 μg, 21 μg, 22 μg, 23 μg, 24 μg, 25 μg, 26 μg, 27 μg, 28 μg, 29 μg, 30 μg, 31 μg, 32 μg, 33 μg, 34 μg, 35 μg, 36 μg, 37 μg, 38 μg, 39 μg, 40 μg, 41 μg, 42 μg, 43 μg, 44 μg, 45 μg, 46 μg, 47 μg, 48 μg, 49 μg, 50 μg, 51 μg, 52 μg, 53 μg, 54 μg, 55 μg, 56 μg, 57 μg, 58 μg, 59 μg, 60 μg, 61 μg, 62 μg, 63 μg, 64 μg, 65 μg, 66 μg, 67 μg, 68 μg, 69 μg, 70 μg, 71 μg, 72 μg, 73 μg, 74 μg, 75 μg, 76 μg, 77 μg, 78 μg, 79 μg, 80 μg, 81 μg, 82 μg, 83 μg, 84 μg, 85 μg, 86 μg, 87 μg, 88 μg, 89 μg, 90 μg, 91 μg, 92 μg, 93 μg, 94 μg, 95 μg, 96 μg, 97 μg, 98 μg, 99 μg, 100 μg, 101 μg, 102 μg, 103 μg, 104 μg, 105 μg, 106 μg, 107 μg, 108 μg, 109 μg, 110 μg, 111 μg, 112 μg, 113 μg, 114 μg, 115 μg, 116 μg, 117 μg, 118 μg, 119 μg, or 120 μg of recombinant RNA molecules per booster administration. In some embodiments, the effective amount comprises or is no more than: 120 μg, 119 μg, 118 μg, 117 μg, 116 μg, 115 μg, 114 μg, 113 μg, 112 μg, 111 μg, 110 μg, 109 μg, 108 μg, 107 μg, 106 μg, 105 μg, 104 μg, 103 μg, 102 μg, 101 μg, 100 μg, 99 μg, 98 μg, 97 μg, 96 μg, 95 μg, 94 μg, 93 μg, 92 μg, 91 μg, 90 μg, 89 μg, 88 μg, 87 μg, 86 μg, 85 μg, 84 μg, 83 μg, 82 μg, 81 μg, 80 μg, 79 μg, 78 μg, 77 μg, 76 μg, 75 μg, 74 μg, 73 μg, 72 μg, 71 μg, 70 μg, 69 μg, 68 μg, 67 μg, 66 μg, 65 μg, 64 μg, 63 μg, 62 μg, 61 μg, 60 μg, 59 μg, 58 μg, 57 μg, 56 μg, 55 μg, 54 μg, 53 μg, 52 μg, 51 μg, 50 μg, 49 μg, 48 μg, 47 μg, 46 μg, 45 μg, 44 μg, 43 μg, 42 μg, 41 μg, 40 μg, 39 μg, 38 μg, 37 μg, 36 μg, 35 μg, 34 μg, 33 μg, 32 μg, 31 μg, 30 μg, 29 μg, 28 μg, 27 μg, 26 μg, 25 μg, 24 μg, 23 μg, 22 μg, 21 μg, 20 μg, 19 μg, 18 μg, 17 μg, 16 μg, or 15 μg of recombinant RNA molecules per booster administration. Taking the above-noted embodiments into account, it is contemplated and supported that any of the above-noted “pg” of “at least” and any of the above-noted “μg” of “no more than” may be combined to provide an enclosed range (i.e. the booster administration comprises or is from 25 μg to 75 μg of recombinant RNA molecules per booster administration). In some embodiments, the booster administration comprises or is from 1 μg to: 2 μg, 3 μg, 4 μg, 5 μg, 6 μg, 7 μg, 8 μg, 9 μg, 10 μg, 11 μg, 12 μg, 13 μg, 14 μg, 15 μg, 16 μg, 17 μg, 18 μg, 19 μg, 20 μg, 21 μg, 22 μg, 23 μg, 24 μg, 25 μg, 26 μg, 27 μg, 28 μg, 29 μg, 30 μg, 31 μg, 32 μg, 33 μg, 34 μg, 35 μg, 36 μg, 37 μg, 38 μg, 39 μg, 40 μg, 41 μg, 42 μg, 43 μg, 44 μg, 45 μg, 46 μg, 47 μg, 48 μg, 49 μg, 50 μg, 51 μg, 52 μg, 53 μg, 54 μg, 55 μg, 56 μg, 57 μg, 58 μg, 59 μg, 60 μg, 61 μg, 62 μg, 63 μg, 64 μg, 65 μg, 66 μg, 67 μg, 68 μg, 69 μg, 70 μg, 71 μg, 72 μg, 73 μg, 74 μg, 75 μg, 76 μg, 77 μg, 78 μg, 79 μg, 80 μg, 81 μg, 82 μg, 83 μg, 84 μg, 85 μg, 86 μg, 87 μg, 88 μg, 89 μg, 90 μg, 91 μg, 92 μg, 93 μg, 94 μg, 95 μg, 96 μg, 97 μg, 98 μg, 99 μg, 100 μg, 101 μg, 102 μg, 103 μg, 104 μg, 105 μg, 106 μg, 107 μg, 108 μg, 109 μg, 110 μg, 111 μg, 112 μg, 113 μg, 114 μg, 115 μg, 116 μg, 117 μg, 118 μg, 119 μg, or 120 μg; from 2 μg to: 3 μg, 4 μg, 5 μg, 6 μg, 7 μg, 8 μg, 9 μg, 10 μg, 11 μg, 12 μg, 13 μg, 14 μg, 15 μg, 16 μg, 17 μg, 18 μg, 19 μg, 20 μg, 21 μg, 22 μg, 23 μg, 24 μg, 25 μg, 26 μg, 27 μg, 28 μg, 29 μg, 30 μg, 31 μg, 32 μg, 33 μg, 34 μg, 35 μg, 36 μg, 37 μg, 38 μg, 39 μg, 40 μg, 41 μg, 42 μg, 43 μg, 44 μg, 45 μg, 46 μg, 47 μg, 48 μg, 49 μg, 50 μg, 51 μg, 52 μg, 53 μg, 54 μg, 55 μg, 56 μg, 57 μg, 58 μg, 59 μg, 60 μg, 61 μg, 62 μg, 63 μg, 64 μg, 65 μg, 66 μg, 67 μg, 68 μg, 69 μg, 70 μg, 71 μg, 72 μg, 73 μg, 74 μg, 75 μg, 76 μg, 77 μg, 78 μg, 79 μg, 80 μg, 81 μg, 82 μg, 83 μg, 84 μg, 85 μg, 86 μg, 87 μg, 88 μg, 89 μg, 90 μg, 91 μg, 92 μg, 93 μg, 94 μg, 95 μg, 96 μg, 97 μg, 98 μg, 99 μg, 100 μg, 101 μg, 102 μg, 103 μg, 104 μg, 105 μg, 106 μg, 107 μg, 108 μg, 109 μg, 110 μg, 111 μg, 112 μg, 113 μg, 114 μg, 115 μg, 116 μg, 117 μg, 118 μg, 119 μg, or 120 μg; from 3 μg to: 4 μg, 5 μg, 6 μg, 7 μg, 8 μg, 9 μg, 10 μg, 11 μg, 12 μg, 13 μg, 14 μg, 15 μg, 16 μg, 17 μg, 18 μg, 19 μg, 20 μg, 21 μg, 22 μg, 23 μg, 24 μg, 25 μg, 26 μg, 27 μg, 28 μg, 29 μg, 30 μg, 31 μg, 32 μg, 33 μg, 34 μg, 35 μg, 36 μg, 37 μg, 38 μg, 39 μg, 40 μg, 41 μg, 42 μg, 43 μg, 44 μg, 45 μg, 46 μg, 47 μg, 48 μg, 49 μg, 50 μg, 51 μg, 52 μg, 53 μg, 54 μg, 55 μg, 56 μg, 57 μg, 58 μg, 59 μg, 60 μg, 61 μg, 62 μg, 63 μg, 64 μg, 65 μg, 66 μg, 67 μg, 68 μg, 69 μg, 70 μg, 71 μg, 72 μg, 73 μg, 74 μg, 75 μg, 76 μg, 77 μg, 78 μg, 79 μg, 80 μg, 81 μg, 82 μg, 83 μg, 84 μg, 85 μg, 86 μg, 87 μg, 88 μg, 89 μg, 90 μg, 91 μg, 92 μg, 93 μg, 94 μg, 95 μg, 96 μg, 97 μg, 98 μg, 99 μg, 100 μg, 101 μg, 102 μg, 103 μg, 104 μg, 105 μg, 106 μg, 107 μg, 108 μg, 109 μg, 110 μg, 111 μg, 112 μg, 113 μg, 114 μg, 115 μg, 116 μg, 117 μg, 118 μg, 119 μg, or 120 μg; from 4 μg to: 5 μg, 6 μg, 7 μg, 8 μg, 9 μg, 10 μg, 11 μg, 12 μg, 13 μg, 14 μg, 15 μg, 16 μg, 17 μg, 18 μg, 19 μg, 20 μg, 21 μg, 22 μg, 23 μg, 24 μg, 25 μg, 26 μg, 27 μg, 28 μg, 29 μg, 30 μg, 31 μg, 32 μg, 33 μg, 34 μg, 35 μg, 36 μg, 37 μg, 38 μg, 39 μg, 40 μg, 41 μg, 42 μg, 43 μg, 44 μg, 45 μg, 46 μg, 47 μg, 48 μg, 49 μg, 50 μg, 51 μg, 52 μg, 53 μg, 54 μg, 55 μg, 56 μg, 57 μg, 58 μg, 59 μg, 60 μg, 61 μg, 62 μg, 63 μg, 64 μg, 65 μg, 66 μg, 67 μg, 68 μg, 69 μg, 70 μg, 71 μg, 72 μg, 73 μg, 74 μg, 75 μg, 76 μg, 77 μg, 78 μg, 79 μg, 80 μg, 81 μg, 82 μg, 83 μg, 84 μg, 85 μg, 86 μg, 87 μg, 88 μg, 89 μg, 90 μg, 91 μg, 92 μg, 93 μg, 94 μg, 95 μg, 96 μg, 97 μg, 98 μg, 99 μg, 100 μg, 101 μg, 102 μg, 103 μg, 104 μg, 105 μg, 106 μg, 107 μg, 108 μg, 109 μg, 110 μg, 111 μg, 112 μg, 113 μg, 114 μg, 115 μg, 116 μg, 117 μg, 118 μg, 119 μg, or 120 μg; from 5 μg to: 6 μg, 7 μg, 8 μg, 9 μg, 10 μg, 11 μg, 12 μg, 13 μg, 14 μg, 15 μg, 16 μg, 17 μg, 18 μg, 19 μg, 20 μg, 21 μg, 22 μg, 23 μg, 24 μg, 25 μg, 26 μg, 27 μg, 28 μg, 29 μg, 30 μg, 31 μg, 32 μg, 33 μg, 34 μg, 35 μg, 36 μg, 37 μg, 38 μg, 39 μg, 40 μg, 41 μg, 42 μg, 43 μg, 44 μg, 45 μg, 46 μg, 47 μg, 48 μg, 49 μg, 50 μg, 51 μg, 52 μg, 53 μg, 54 μg, 55 μg, 56 μg, 57 μg, 58 μg, 59 μg, 60 μg, 61 μg, 62 μg, 63 μg, 64 μg, 65 μg, 66 μg, 67 μg, 68 μg, 69 μg, 70 μg, 71 μg, 72 μg, 73 μg, 74 μg, 75 μg, 76 μg, 77 μg, 78 μg, 79 μg, 80 μg, 81 μg, 82 μg, 83 μg, 84 μg, 85 μg, 86 μg, 87 μg, 88 μg, 89 μg, 90 μg, 91 μg, 92 μg, 93 μg, 94 μg, 95 μg, 96 μg, 97 μg, 98 μg, 99 μg, 100 μg, 101 μg, 102 μg, 103 μg, 104 μg, 105 μg, 106 μg, 107 μg, 108 μg, 109 μg, 110 μg, 111 μg, 112 μg, 113 μg, 114 μg, 115 μg, 116 μg, 117 μg, 118 μg, 119 μg, or 120 μg; from 6 μg to: 7 μg, 8 μg, 9 μg, 10 μg, 11 μg, 12 μg, 13 μg, 14 μg, 15 μg, 16 μg, 17 μg, 18 μg, 19 μg, 20 μg, 21 μg, 22 μg, 23 μg, 24 μg, 25 μg, 26 μg, 27 μg, 28 μg, 29 μg, 30 μg, 31 μg, 32 μg, 33 μg, 34 μg, 35 μg, 36 μg, 37 μg, 38 μg, 39 μg, 40 μg, 41 μg, 42 μg, 43 μg, 44 μg, 45 μg, 46 μg, 47 μg, 48 μg, 49 μg, 50 μg, 51 μg, 52 μg, 53 μg, 54 μg, 55 μg, 56 μg, 57 μg, 58 μg, 59 μg, 60 μg, 61 μg, 62 μg, 63 μg, 64 μg, 65 μg, 66 μg, 67 μg, 68 μg, 69 μg, 70 μg, 71 μg, 72 μg, 73 μg, 74 μg, 75 μg, 76 μg, 77 μg, 78 μg, 79 μg, 80 μg, 81 μg, 82 μg, 83 μg, 84 μg, 85 μg, 86 μg, 87 μg, 88 μg, 89 μg, 90 μg, 91 μg, 92 μg, 93 μg, 94 μg, 95 μg, 96 μg, 97 μg, 98 μg, 99 μg, 100 μg, 101 μg, 102 μg, 103 μg, 104 μg, 105 μg, 106 μg, 107 μg, 108 μg, 109 μg, 110 μg, 111 μg, 112 μg, 113 μg, 114 μg, 115 μg, 116 μg, 117 μg, 118 μg, 119 μg, or 120 μg; from 8 μg to: 9 μg, 10 μg, 11 μg, 12 μg, 13 μg, 14 μg, 15 μg, 16 μg, 17 μg, 18 μg, 19 μg, 20 μg, 21 μg, 22 μg, 23 μg, 24 μg, 25 μg, 26 μg, 27 μg, 28 μg, 29 μg, 30 μg, 31 μg, 32 μg, 33 μg, 34 μg, 35 μg, 36 μg, 37 μg, 38 μg, 39 μg, 40 μg, 41 μg, 42 μg, 43 μg, 44 μg, 45 μg, 46 μg, 47 μg, 48 μg, 49 μg, 50 μg, 51 μg, 52 μg, 53 μg, 54 μg, 55 μg, 56 μg, 57 μg, 58 μg, 59 μg, 60 μg, 61 μg, 62 μg, 63 μg, 64 μg, 65 μg, 66 μg, 67 μg, 68 μg, 69 μg, 70 μg, 71 μg, 72 μg, 73 μg, 74 μg, 75 μg, 76 μg, 77 μg, 78 μg, 79 μg, 80 μg, 81 μg, 82 μg, 83 μg, 84 μg, 85 μg, 86 μg, 87 μg, 88 μg, 89 μg, 90 μg, 91 μg, 92 μg, 93 μg, 94 μg, 95 μg, 96 μg, 97 μg, 98 μg, 99 μg, 100 μg, 101 μg, 102 μg, 103 μg, 104 μg, 105 μg, 106 μg, 107 μg, 108 μg, 109 μg, 110 μg, 111 μg, 112 μg, 113 μg, 114 μg, 115 μg, 116 μg, 117 μg, 118 μg, 119 μg, or 120 μg; from 9 μg to: 10 μg, 11 μg, 12 μg, 13 μg, 14 μg, 15 μg, 16 μg, 17 μg, 18 μg, 19 μg, 20 μg, 21 μg, 22 μg, 23 μg, 24 μg, 25 μg, 26 μg, 27 μg, 28 μg, 29 μg, 30 μg, 31 μg, 32 μg, 33 μg, 34 μg, 35 μg, 36 μg, 37 μg, 38 μg, 39 μg, 40 μg, 41 μg, 42 μg, 43 μg, 44 μg, 45 μg, 46 μg, 47 μg, 48 μg, 49 μg, 50 μg, 51 μg, 52 μg, 53 μg, 54 μg, 55 μg, 56 μg, 57 μg, 58 μg, 59 μg, 60 μg, 61 μg, 62 μg, 63 μg, 64 μg, 65 μg, 66 μg, 67 μg, 68 μg, 69 μg, 70 μg, 71 μg, 72 μg, 73 μg, 74 μg, 75 μg, 76 μg, 77 μg, 78 μg, 79 μg, 80 μg, 81 μg, 82 μg, 83 μg, 84 μg, 85 μg, 86 μg, 87 μg, 88 μg, 89 μg, 90 μg, 91 μg, 92 μg, 93 μg, 94 μg, 95 μg, 96 μg, 97 μg, 98 μg, 99 μg, 100 μg, 101 μg, 102 μg, 103 μg, 104 μg, 105 μg, 106 μg, 107 μg, 108 μg, 109 μg, 110 μg, 111 μg, 112 μg, 113 μg, 114 μg, 115 μg, 116 μg, 117 μg, 118 μg, 119 μg, or 120 μg; from 10 μg to: 11 μg, 12 μg, 13 μg, 14 μg, 15 μg, 16 μg, 17 μg, 18 μg, 19 μg, 20 μg, 21 μg, 22 μg, 23 μg, 24 μg, 25 μg, 26 μg, 27 μg, 28 μg, 29 μg, 30 μg, 31 μg, 32 μg, 33 μg, 34 μg, 35 μg, 36 μg, 37 μg, 38 μg, 39 μg, 40 μg, 41 μg, 42 μg, 43 μg, 44 μg, 45 μg, 46 μg, 47 μg, 48 μg, 49 μg, 50 μg, 51 μg, 52 μg, 53 μg, 54 μg, 55 μg, 56 μg, 57 μg, 58 μg, 59 μg, 60 μg, 61 μg, 62 μg, 63 μg, 64 μg, 65 μg, 66 μg, 67 μg, 68 μg, 69 μg, 70 μg, 71 μg, 72 μg, 73 μg, 74 μg, 75 μg, 76 μg, 77 μg, 78 μg, 79 μg, 80 μg, 81 μg, 82 μg, 83 μg, 84 μg, 85 μg, 86 μg, 87 μg, 88 μg, 89 μg, 90 μg, 91 μg, 92 μg, 93 μg, 94 μg, 95 μg, 96 μg, 97 μg, 98 μg, 99 μg, 100 μg, 101 μg, 102 μg, 103 μg, 104 μg, 105 μg, 106 μg, 107 μg, 108 μg, 109 μg, 110 μg, 111 μg, 112 μg, 113 μg, 114 μg, 115 μg, 116 μg, 117 μg, 118 μg, 119 μg, or 120 μg; from 11 μg to: 12 μg, 13 μg, 14 μg, 15 μg, 16 μg, 17 μg, 18 μg, 19 μg, 20 μg, 21 μg, 22 μg, 23 μg, 24 μg, 25 μg, 26 μg, 27 μg, 28 μg, 29 μg, 30 μg, 31 μg, 32 μg, 33 μg, 34 μg, 35 μg, 36 μg, 37 μg, 38 μg, 39 μg, 40 μg, 41 μg, 42 μg, 43 μg, 44 μg, 45 μg, 46 μg, 47 μg, 48 μg, 49 μg, 50 μg, 51 μg, 52 μg, 53 μg, 54 μg, 55 μg, 56 μg, 57 μg, 58 μg, 59 μg, 60 μg, 61 μg, 62 μg, 63 μg, 64 μg, 65 μg, 66 μg, 67 μg, 68 μg, 69 μg, 70 μg, 71 μg, 72 μg, 73 μg, 74 μg, 75 μg, 76 μg, 77 μg, 78 μg, 79 μg, 80 μg, 81 μg, 82 μg, 83 μg, 84 μg, 85 μg, 86 μg, 87 μg, 88 μg, 89 μg, 90 μg, 91 μg, 92 μg, 93 μg, 94 μg, 95 μg, 96 μg, 97 μg, 98 μg, 99 μg, 100 μg, 101 μg, 102 μg, 103 μg, 104 μg, 105 μg, 106 μg, 107 μg, 108 μg, 109 μg, 110 μg, 111 μg, 112 μg, 113 μg, 114 μg, 115 μg, 116 μg, 117 μg, 118 μg, 119 μg, or 120 μg; from 12 μg to: 13 μg, 14 μg, 15 μg, 16 μg, 17 μg, 18 μg, 19 μg, 20 μg, 21 μg, 22 μg, 23 μg, 24 μg, 25 μg, 26 μg, 27 μg, 28 μg, 29 μg, 30 μg, 31 μg, 32 μg, 33 μg, 34 μg, 35 μg, 36 μg, 37 μg, 38 μg, 39 μg, 40 μg, 41 μg, 42 μg, 43 μg, 44 μg, 45 μg, 46 μg, 47 μg, 48 μg, 49 μg, 50 μg, 51 μg, 52 μg, 53 μg, 54 μg, 55 μg, 56 μg, 57 μg, 58 μg, 59 μg, 60 μg, 61 μg, 62 μg, 63 μg, 64 μg, 65 μg, 66 μg, 67 μg, 68 μg, 69 μg, 70 μg, 71 μg, 72 μg, 73 μg, 74 μg, 75 μg, 76 μg, 77 μg, 78 μg, 79 μg, 80 μg, 81 μg, 82 μg, 83 μg, 84 μg, 85 μg, 86 μg, 87 μg, 88 μg, 89 μg, 90 μg, 91 μg, 92 μg, 93 μg, 94 μg, 95 μg, 96 μg, 97 μg, 98 μg, 99 μg, 100 μg, 101 μg, 102 μg, 103 μg, 104 μg, 105 μg, 106 μg, 107 μg, 108 μg, 109 μg, 110 μg, 111 μg, 112 μg, 113 μg, 114 μg, 115 μg, 116 μg, 117 μg, 118 μg, 119 μg, or 120 μg; from 13 μg to: 14 μg, 15 μg, 16 μg, 17 μg, 18 μg, 19 μg, 20 μg, 21 μg, 22 μg, 23 μg, 24 μg, 25 μg, 26 μg, 27 μg, 28 μg, 29 μg, 30 μg, 31 μg, 32 μg, 33 μg, 34 μg, 35 μg, 36 μg, 37 μg, 38 μg, 39 μg, 40 μg, 41 μg, 42 μg, 43 μg, 44 μg, 45 μg, 46 μg, 47 μg, 48 μg, 49 μg, 50 μg, 51 μg, 52 μg, 53 μg, 54 μg, 55 μg, 56 μg, 57 μg, 58 μg, 59 μg, 60 μg, 61 μg, 62 μg, 63 μg, 64 μg, 65 μg, 66 μg, 67 μg, 68 μg, 69 μg, 70 μg, 71 μg, 72 μg, 73 μg, 74 μg, 75 μg, 76 μg, 77 μg, 78 μg, 79 μg, 80 μg, 81 μg, 82 μg, 83 μg, 84 μg, 85 μg, 86 μg, 87 μg, 88 μg, 89 μg, 90 μg, 91 μg, 92 μg, 93 μg, 94 μg, 95 μg, 96 μg, 97 μg, 98 μg, 99 μg, 100 μg, 101 μg, 102 μg, 103 μg, 104 μg, 105 μg, 106 μg, 107 μg, 108 μg, 109 μg, 110 μg, 111 μg, 112 μg, 113 μg, 114 μg, 115 μg, 116 μg, 117 μg, 118 μg, 119 μg, or 120 μg; from 14 μg to: 15 μg, 16 μg, 17 μg, 18 μg, 19 μg, 20 μg, 21 μg, 22 μg, 23 μg, 24 μg, 25 μg, 26 μg, 27 μg, 28 μg, 29 μg, 30 μg, 31 μg, 32 μg, 33 μg, 34 μg, 35 μg, 36 μg, 37 μg, 38 μg, 39 μg, 40 μg, 41 μg, 42 μg, 43 μg, 44 μg, 45 μg, 46 μg, 47 μg, 48 μg, 49 μg, 50 μg, 51 μg, 52 μg, 53 μg, 54 μg, 55 μg, 56 μg, 57 μg, 58 μg, 59 μg, 60 μg, 61 μg, 62 μg, 63 μg, 64 μg, 65 μg, 66 μg, 67 μg, 68 μg, 69 μg, 70 μg, 71 μg, 72 μg, 73 μg, 74 μg, 75 μg, 76 μg, 77 μg, 78 μg, 79 μg, 80 μg, 81 μg, 82 μg, 83 μg, 84 μg, 85 μg, 86 μg, 87 μg, 88 μg, 89 μg, 90 μg, 91 μg, 92 μg, 93 μg, 94 μg, 95 μg, 96 μg, 97 μg, 98 μg, 99 μg, 100 μg, 101 μg, 102 μg, 103 μg, 104 μg, 105 μg, 106 μg, 107 μg, 108 μg, 109 μg, 110 μg, 111 μg, 112 μg, 113 μg, 114 μg, 115 μg, 116 μg, 117 μg, 118 μg, 119 μg, or 120 μg; from 15 μg to: 16 μg, 17 μg, 18 μg, 19 μg, 20 μg, 21 μg, 22 μg, 23 μg, 24 μg, 25 μg, 26 μg, 27 μg, 28 μg, 29 μg, 30 μg, 31 μg, 32 μg, 33 μg, 34 μg, 35 μg, 36 μg, 37 μg, 38 μg, 39 μg, 40 μg, 41 μg, 42 μg, 43 μg, 44 μg, 45 μg, 46 μg, 47 μg, 48 μg, 49 μg, 50 μg, 51 μg, 52 μg, 53 μg, 54 μg, 55 μg, 56 μg, 57 μg, 58 μg, 59 μg, 60 μg, 61 μg, 62 μg, 63 μg, 64 μg, 65 μg, 66 μg, 67 μg, 68 μg, 69 μg, 70 μg, 71 μg, 72 μg, 73 μg, 74 μg, 75 μg, 76 μg, 77 μg, 78 μg, 79 μg, 80 μg, 81 μg, 82 μg, 83 μg, 84 μg, 85 μg, 86 μg, 87 μg, 88 μg, 89 μg, 90 μg, 91 μg, 92 μg, 93 μg, 94 μg, 95 μg, 96 μg, 97 μg, 98 μg, 99 μg, 100 μg, 101 μg, 102 μg, 103 μg, 104 μg, 105 μg, 106 μg, 107 μg, 108 μg, 109 μg, 110 μg, 111 μg, 112 μg, 113 μg, 114 μg, 115 μg, 116 μg, 117 μg, 118 μg, 119 μg, or 120 μg; from 16 μg to: 17 μg, 18 μg, 19 μg, 20 μg, 21 μg, 22 μg, 23 μg, 24 μg, 25 μg, 26 μg, 27 μg, 28 μg, 29 μg, 30 μg, 31 μg, 32 μg, 33 μg, 34 μg, 35 μg, 36 μg, 37 μg, 38 μg, 39 μg, 40 μg, 41 μg, 42 μg, 43 μg, 44 μg, 45 μg, 46 μg, 47 μg, 48 μg, 49 μg, 50 μg, 51 μg, 52 μg, 53 μg, 54 μg, 55 μg, 56 μg, 57 μg, 58 μg, 59 μg, 60 μg, 61 μg, 62 μg, 63 μg, 64 μg, 65 μg, 66 μg, 67 μg, 68 μg, 69 μg, 70 μg, 71 μg, 72 μg, 73 μg, 74 μg, 75 μg, 76 μg, 77 μg, 78 μg, 79 μg, 80 μg, 81 μg, 82 μg, 83 μg, 84 μg, 85 μg, 86 μg, 87 μg, 88 μg, 89 μg, 90 μg, 91 μg, 92 μg, 93 μg, 94 μg, 95 μg, 96 μg, 97 μg, 98 μg, 99 μg, 100 μg, 101 μg, 102 μg, 103 μg, 104 μg, 105 μg, 106 μg, 107 μg, 108 μg, 109 μg, 110 μg, 111 μg, 112 μg, 113 μg, 114 μg, 115 μg, 116 μg, 117 μg, 118 μg, 119 μg, or 120 μg; from 17 μg to: 18 μg, 19 μg, 20 μg, 21 μg, 22 μg, 23 μg, 24 μg, 25 μg, 26 μg, 27 μg, 28 μg, 29 μg, 30 μg, 31 μg, 32 μg, 33 μg, 34 μg, 35 μg, 36 μg, 37 μg, 38 μg, 39 μg, 40 μg, 41 μg, 42 μg, 43 μg, 44 μg, 45 μg, 46 μg, 47 μg, 48 μg, 49 μg, 50 μg, 51 μg, 52 μg, 53 μg, 54 μg, 55 μg, 56 μg, 57 μg, 58 μg, 59 μg, 60 μg, 61 μg, 62 μg, 63 μg, 64 μg, 65 μg, 66 μg, 67 μg, 68 μg, 69 μg, 70 μg, 71 μg, 72 μg, 73 μg, 74 μg, 75 μg, 76 μg, 77 μg, 78 μg, 79 μg, 80 μg, 81 μg, 82 μg, 83 μg, 84 μg, 85 μg, 86 μg, 87 μg, 88 μg, 89 μg, 90 μg, 91 μg, 92 μg, 93 μg, 94 μg, 95 μg, 96 μg, 97 μg, 98 μg, 99 μg, 100 μg, 101 μg, 102 μg, 103 μg, 104 μg, 105 μg, 106 μg, 107 μg, 108 μg, 109 μg, 110 μg, 111 μg, 112 μg, 113 μg, 114 μg, 115 μg, 116 μg, 117 μg, 118 μg, 119 μg, or 120 μg; from 18 μg to: 19 μg, 20 μg, 21 μg, 22 μg, 23 μg, 24 μg, 25 μg, 26 μg, 27 μg, 28 μg, 29 μg, 30 μg, 31 μg, 32 μg, 33 μg, 34 μg, 35 μg, 36 μg, 37 μg, 38 μg, 39 μg, 40 μg, 41 μg, 42 μg, 43 μg, 44 μg, 45 μg, 46 μg, 47 μg, 48 μg, 49 μg, 50 μg, 51 μg, 52 μg, 53 μg, 54 μg, 55 μg, 56 μg, 57 μg, 58 μg, 59 μg, 60 μg, 61 μg, 62 μg, 63 μg, 64 μg, 65 μg, 66 μg, 67 μg, 68 μg, 69 μg, 70 μg, 71 μg, 72 μg, 73 μg, 74 μg, 75 μg, 76 μg, 77 μg, 78 μg, 79 μg, 80 μg, 81 μg, 82 μg, 83 μg, 84 μg, 85 μg, 86 μg, 87 μg, 88 μg, 89 μg, 90 μg, 91 μg, 92 μg, 93 μg, 94 μg, 95 μg, 96 μg, 97 μg, 98 μg, 99 μg, 100 μg, 101 μg, 102 μg, 103 μg, 104 μg, 105 μg, 106 μg, 107 μg, 108 μg, 109 μg, 110 μg, 111 μg, 112 μg, 113 μg, 114 μg, 115 μg, 116 μg, 117 μg, 118 μg, 119 μg, or 120 μg; from 19 μg to: 20 μg, 21 μg, 22 μg, 23 μg, 24 μg, 25 μg, 26 μg, 27 μg, 28 μg, 29 μg, 30 μg, 31 μg, 32 μg, 33 μg, 34 μg, 35 μg, 36 μg, 37 μg, 38 μg, 39 μg, 40 μg, 41 μg, 42 μg, 43 μg, 44 μg, 45 μg, 46 μg, 47 μg, 48 μg, 49 μg, 50 μg, 51 μg, 52 μg, 53 μg, 54 μg, 55 μg, 56 μg, 57 μg, 58 μg, 59 μg, 60 μg, 61 μg, 62 μg, 63 μg, 64 μg, 65 μg, 66 μg, 67 μg, 68 μg, 69 μg, 70 μg, 71 μg, 72 μg, 73 μg, 74 μg, 75 μg, 76 μg, 77 μg, 78 μg, 79 μg, 80 μg, 81 μg, 82 μg, 83 μg, 84 μg, 85 μg, 86 μg, 87 μg, 88 μg, 89 μg, 90 μg, 91 μg, 92 μg, 93 μg, 94 μg, 95 μg, 96 μg, 97 μg, 98 μg, 99 μg, 100 μg, 101 μg, 102 μg, 103 μg, 104 μg, 105 μg, 106 μg, 107 μg, 108 μg, 109 μg, 110 μg, 111 μg, 112 μg, 113 μg, 114 μg, 115 μg, 116 μg, 117 μg, 118 μg, 119 μg, or 120 μg; from 20 μg to: 21 μg, 22 μg, 23 μg, 24 μg, 25 μg, 26 μg, 27 μg, 28 μg, 29 μg, 30 μg, 31 μg, 32 μg, 33 μg, 34 μg, 35 μg, 36 μg, 37 μg, 38 μg, 39 μg, 40 μg, 41 μg, 42 μg, 43 μg, 44 μg, 45 μg, 46 μg, 47 μg, 48 μg, 49 μg, 50 μg, 51 μg, 52 μg, 53 μg, 54 μg, 55 μg, 56 μg, 57 μg, 58 μg, 59 μg, 60 μg, 61 μg, 62 μg, 63 μg, 64 μg, 65 μg, 66 μg, 67 μg, 68 μg, 69 μg, 70 μg, 71 μg, 72 μg, 73 μg, 74 μg, 75 μg, 76 μg, 77 μg, 78 μg, 79 μg, 80 μg, 81 μg, 82 μg, 83 μg, 84 μg, 85 μg, 86 μg, 87 μg, 88 μg, 89 μg, 90 μg, 91 μg, 92 μg, 93 μg, 94 μg, 95 μg, 96 μg, 97 μg, 98 μg, 99 μg, 100 μg, 101 μg, 102 μg, 103 μg, 104 μg, 105 μg, 106 μg, 107 μg, 108 μg, 109 μg, 110 μg, 111 μg, 112 μg, 113 μg, 114 μg, 115 μg, 116 μg, 117 μg, 118 μg, 119 μg, or 120 μg; from 21 μg to: 22 μg, 23 μg, 24 μg, 25 μg, 26 μg, 27 μg, 28 μg, 29 μg, 30 μg, 31 μg, 32 μg, 33 μg, 34 μg, 35 μg, 36 μg, 37 μg, 38 μg, 39 μg, 40 μg, 41 μg, 42 μg, 43 μg, 44 μg, 45 μg, 46 μg, 47 μg, 48 μg, 49 μg, 50 μg, 51 μg, 52 μg, 53 μg, 54 μg, 55 μg, 56 μg, 57 μg, 58 μg, 59 μg, 60 μg, 61 μg, 62 μg, 63 μg, 64 μg, 65 μg, 66 μg, 67 μg, 68 μg, 69 μg, 70 μg, 71 μg, 72 μg, 73 μg, 74 μg, 75 μg, 76 μg, 77 μg, 78 μg, 79 μg, 80 μg, 81 μg, 82 μg, 83 μg, 84 μg, 85 μg, 86 μg, 87 μg, 88 μg, 89 μg, 90 μg, 91 μg, 92 μg, 93 μg, 94 μg, 95 μg, 96 μg, 97 μg, 98 μg, 99 μg, 100 μg, 101 μg, 102 μg, 103 μg, 104 μg, 105 μg, 106 μg, 107 μg, 108 μg, 109 μg, 110 μg, 111 μg, 112 μg, 113 μg, 114 μg, 115 μg, 116 μg, 117 μg, 118 μg, 119 μg, or 120 μg; from 22 μg to: 23 μg, 24 μg, 25 μg, 26 μg, 27 μg, 28 μg, 29 μg, 30 μg, 31 μg, 32 μg, 33 μg, 34 μg, 35 μg, 36 μg, 37 μg, 38 μg, 39 μg, 40 μg, 41 μg, 42 μg, 43 μg, 44 μg, 45 μg, 46 μg, 47 μg, 48 μg, 49 μg, 50 μg, 51 μg, 52 μg, 53 μg, 54 μg, 55 μg, 56 μg, 57 μg, 58 μg, 59 μg, 60 μg, 61 μg, 62 μg, 63 μg, 64 μg, 65 μg, 66 μg, 67 μg, 68 μg, 69 μg, 70 μg, 71 μg, 72 μg, 73 μg, 74 μg, 75 μg, 76 μg, 77 μg, 78 μg, 79 μg, 80 μg, 81 μg, 82 μg, 83 μg, 84 μg, 85 μg, 86 μg, 87 μg, 88 μg, 89 μg, 90 μg, 91 μg, 92 μg, 93 μg, 94 μg, 95 μg, 96 μg, 97 μg, 98 μg, 99 μg, 100 μg, 101 μg, 102 μg, 103 μg, 104 μg, 105 μg, 106 μg, 107 μg, 108 μg, 109 μg, 110 μg, 111 μg, 112 μg, 113 μg, 114 μg, 115 μg, 116 μg, 117 μg, 118 μg, 119 μg, or 120 μg; from 23 μg to: 24 μg, 25 μg, 26 μg, 27 μg, 28 μg, 29 μg, 30 μg, 31 μg, 32 μg, 33 μg, 34 μg, 35 μg, 36 μg, 37 μg, 38 μg, 39 μg, 40 μg, 41 μg, 42 μg, 43 μg, 44 μg, 45 μg, 46 μg, 47 μg, 48 μg, 49 μg, 50 μg, 51 μg, 52 μg, 53 μg, 54 μg, 55 μg, 56 μg, 57 μg, 58 μg, 59 μg, 60 μg, 61 μg, 62 μg, 63 μg, 64 μg, 65 μg, 66 μg, 67 μg, 68 μg, 69 μg, 70 μg, 71 μg, 72 μg, 73 μg, 74 μg, 75 μg, 76 μg, 77 μg, 78 μg, 79 μg, 80 μg, 81 μg, 82 μg, 83 μg, 84 μg, 85 μg, 86 μg, 87 μg, 88 μg, 89 μg, 90 μg, 91 μg, 92 μg, 93 μg, 94 μg, 95 μg, 96 μg, 97 μg, 98 μg, 99 μg, 100 μg, 101 μg, 102 μg, 103 μg, 104 μg, 105 μg, 106 μg, 107 μg, 108 μg, 109 μg, 110 μg, 111 μg, 112 μg, 113 μg, 114 μg, 115 μg, 116 μg, 117 μg, 118 μg, 119 μg, or 120 μg; from 24 μg to: 25 μg, 26 μg, 27 μg, 28 μg, 29 μg, 30 μg, 31 μg, 32 μg, 33 μg, 34 μg, 35 μg, 36 μg, 37 μg, 38 μg, 39 μg, 40 μg, 41 μg, 42 μg, 43 μg, 44 μg, 45 μg, 46 μg, 47 μg, 48 μg, 49 μg, 50 μg, 51 μg, 52 μg, 53 μg, 54 μg, 55 μg, 56 μg, 57 μg, 58 μg, 59 μg, 60 μg, 61 μg, 62 μg, 63 μg, 64 μg, 65 μg, 66 μg, 67 μg, 68 μg, 69 μg, 70 μg, 71 μg, 72 μg, 73 μg, 74 μg, 75 μg, 76 μg, 77 μg, 78 μg, 79 μg, 80 μg, 81 μg, 82 μg, 83 μg, 84 μg, 85 μg, 86 μg, 87 μg, 88 μg, 89 μg, 90 μg, 91 μg, 92 μg, 93 μg, 94 μg, 95 μg, 96 μg, 97 μg, 98 μg, 99 μg, 100 μg, 101 μg, 102 μg, 103 μg, 104 μg, 105 μg, 106 μg, 107 μg, 108 μg, 109 μg, 110 μg, 111 μg, 112 μg, 113 μg, 114 μg, 115 μg, 116 μg, 117 μg, 118 μg, 119 μg, or 120 μg; from 25 μg to: 26 μg, 27 μg, 28 μg, 29 μg, 30 μg, 31 μg, 32 μg, 33 μg, 34 μg, 35 μg, 36 μg, 37 μg, 38 μg, 39 μg, 40 μg, 41 μg, 42 μg, 43 μg, 44 μg, 45 μg, 46 μg, 47 μg, 48 μg, 49 μg, 50 μg, 51 μg, 52 μg, 53 μg, 54 μg, 55 μg, 56 μg, 57 μg, 58 μg, 59 μg, 60 μg, 61 μg, 62 μg, 63 μg, 64 μg, 65 μg, 66 μg, 67 μg, 68 μg, 69 μg, 70 μg, 71 μg, 72 μg, 73 μg, 74 μg, 75 μg, 76 μg, 77 μg, 78 μg, 79 μg, 80 μg, 81 μg, 82 μg, 83 μg, 84 μg, 85 μg, 86 μg, 87 μg, 88 μg, 89 μg, 90 μg, 91 μg, 92 μg, 93 μg, 94 μg, 95 μg, 96 μg, 97 μg, 98 μg, 99 μg, 100 μg, 101 μg, 102 μg, 103 μg, 104 μg, 105 μg, 106 μg, 107 μg, 108 μg, 109 μg, 110 μg, 111 μg, 112 μg, 113 μg, 114 μg, 115 μg, 116 μg, 117 μg, 118 μg, 119 μg, or 120 μg; from 26 μg to: 27 μg, 28 μg, 29 μg, 30 μg, 31 μg, 32 μg, 33 μg, 34 μg, 35 μg, 36 μg, 37 μg, 38 μg, 39 μg, 40 μg, 41 μg, 42 μg, 43 μg, 44 μg, 45 μg, 46 μg, 47 μg, 48 μg, 49 μg, 50 μg, 51 μg, 52 μg, 53 μg, 54 μg, 55 μg, 56 μg, 57 μg, 58 μg, 59 μg, 60 μg, 61 μg, 62 μg, 63 μg, 64 μg, 65 μg, 66 μg, 67 μg, 68 μg, 69 μg, 70 μg, 71 μg, 72 μg, 73 μg, 74 μg, 75 μg, 76 μg, 77 μg, 78 μg, 79 μg, 80 μg, 81 μg, 82 μg, 83 μg, 84 μg, 85 μg, 86 μg, 87 μg, 88 μg, 89 μg, 90 μg, 91 μg, 92 μg, 93 μg, 94 μg, 95 μg, 96 μg, 97 μg, 98 μg, 99 μg, 100 μg, 101 μg, 102 μg, 103 μg, 104 μg, 105 μg, 106 μg, 107 μg, 108 μg, 109 μg, 110 μg, 111 μg, 112 μg, 113 μg, 114 μg, 115 μg, 116 μg, 117 μg, 118 μg, 119 μg, or 120 μg; from 27 μg to: 28 μg, 29 μg, 30 μg, 31 μg, 32 μg, 33 μg, 34 μg, 35 μg, 36 μg, 37 μg, 38 μg, 39 μg, 40 μg, 41 μg, 42 μg, 43 μg, 44 μg, 45 μg, 46 μg, 47 μg, 48 μg, 49 μg, 50 μg, 51 μg, 52 μg, 53 μg, 54 μg, 55 μg, 56 μg, 57 μg, 58 μg, 59 μg, 60 μg, 61 μg, 62 μg, 63 μg, 64 μg, 65 μg, 66 μg, 67 μg, 68 μg, 69 μg, 70 μg, 71 μg, 72 μg, 73 μg, 74 μg, 75 μg, 76 μg, 77 μg, 78 μg, 79 μg, 80 μg, 81 μg, 82 μg, 83 μg, 84 μg, 85 μg, 86 μg, 87 μg, 88 μg, 89 μg, 90 μg, 91 μg, 92 μg, 93 μg, 94 μg, 95 μg, 96 μg, 97 μg, 98 μg, 99 μg, 100 μg, 101 μg, 102 μg, 103 μg, 104 μg, 105 μg, 106 μg, 107 μg, 108 μg, 109 μg, 110 μg, 111 μg, 112 μg, 113 μg, 114 μg, 115 μg, 116 μg, 117 μg, 118 μg, 119 μg, or 120 μg; from 28 μg to: 29 μg, 30 μg, 31 μg, 32 μg, 33 μg, 34 μg, 35 μg, 36 μg, 37 μg, 38 μg, 39 μg, 40 μg, 41 μg, 42 μg, 43 μg, 44 μg, 45 μg, 46 μg, 47 μg, 48 μg, 49 μg, 50 μg, 51 μg, 52 μg, 53 μg, 54 μg, 55 μg, 56 μg, 57 μg, 58 μg, 59 μg, 60 μg, 61 μg, 62 μg, 63 μg, 64 μg, 65 μg, 66 μg, 67 μg, 68 μg, 69 μg, 70 μg, 71 μg, 72 μg, 73 μg, 74 μg, 75 μg, 76 μg, 77 μg, 78 μg, 79 μg, 80 μg, 81 μg, 82 μg, 83 μg, 84 μg, 85 μg, 86 μg, 87 μg, 88 μg, 89 μg, 90 μg, 91 μg, 92 μg, 93 μg, 94 μg, 95 μg, 96 μg, 97 μg, 98 μg, 99 μg, 100 μg, 101 μg, 102 μg, 103 μg, 104 μg, 105 μg, 106 μg, 107 μg, 108 μg, 109 μg, 110 μg, 111 μg, 112 μg, 113 μg, 114 μg, 115 μg, 116 μg, 117 μg, 118 μg, 119 μg, or 120 μg; from 29 μg to: 30 μg, 31 μg, 32 μg, 33 μg, 34 μg, 35 μg, 36 μg, 37 μg, 38 μg, 39 μg, 40 μg, 41 μg, 42 μg, 43 μg, 44 μg, 45 μg, 46 μg, 47 μg, 48 μg, 49 μg, 50 μg, 51 μg, 52 μg, 53 μg, 54 μg, 55 μg, 56 μg, 57 μg, 58 μg, 59 μg, 60 μg, 61 μg, 62 μg, 63 μg, 64 μg, 65 μg, 66 μg, 67 μg, 68 μg, 69 μg, 70 μg, 71 μg, 72 μg, 73 μg, 74 μg, 75 μg, 76 μg, 77 μg, 78 μg, 79 μg, 80 μg, 81 μg, 82 μg, 83 μg, 84 μg, 85 μg, 86 μg, 87 μg, 88 μg, 89 μg, 90 μg, 91 μg, 92 μg, 93 μg, 94 μg, 95 μg, 96 μg, 97 μg, 98 μg, 99 μg, 100 μg, 101 μg, 102 μg, 103 μg, 104 μg, 105 μg, 106 μg, 107 μg, 108 μg, 109 μg, 110 μg, 111 μg, 112 μg, 113 μg, 114 μg, 115 μg, 116 μg, 117 μg, 118 μg, 119 μg, or 120 μg; from 30 μg to: 31 μg, 32 μg, 33 μg, 34 μg, 35 μg, 36 μg, 37 μg, 38 μg, 39 μg, 40 μg, 41 μg, 42 μg, 43 μg, 44 μg, 45 μg, 46 μg, 47 μg, 48 μg, 49 μg, 50 μg, 51 μg, 52 μg, 53 μg, 54 μg, 55 μg, 56 μg, 57 μg, 58 μg, 59 μg, 60 μg, 61 μg, 62 μg, 63 μg, 64 μg, 65 μg, 66 μg, 67 μg, 68 μg, 69 μg, 70 μg, 71 μg, 72 μg, 73 μg, 74 μg, 75 μg, 76 μg, 77 μg, 78 μg, 79 μg, 80 μg, 81 μg, 82 μg, 83 μg, 84 μg, 85 μg, 86 μg, 87 μg, 88 μg, 89 μg, 90 μg, 91 μg, 92 μg, 93 μg, 94 μg, 95 μg, 96 μg, 97 μg, 98 μg, 99 μg, 100 μg, 101 μg, 102 μg, 103 μg, 104 μg, 105 μg, 106 μg, 107 μg, 108 μg, 109 μg, 110 μg, 111 μg, 112 μg, 113 μg, 114 μg, 115 μg, 116 μg, 117 μg, 118 μg, 119 μg, or 120 μg; from 31 μg to: 32 μg, 33 μg, 34 μg, 35 μg, 36 μg, 37 μg, 38 μg, 39 μg, 40 μg, 41 μg, 42 μg, 43 μg, 44 μg, 45 μg, 46 μg, 47 μg, 48 μg, 49 μg, 50 μg, 51 μg, 52 μg, 53 μg, 54 μg, 55 μg, 56 μg, 57 μg, 58 μg, 59 μg, 60 μg, 61 μg, 62 μg, 63 μg, 64 μg, 65 μg, 66 μg, 67 μg, 68 μg, 69 μg, 70 μg, 71 μg, 72 μg, 73 μg, 74 μg, 75 μg, 76 μg, 77 μg, 78 μg, 79 μg, 80 μg, 81 μg, 82 μg, 83 μg, 84 μg, 85 μg, 86 μg, 87 μg, 88 μg, 89 μg, 90 μg, 91 μg, 92 μg, 93 μg, 94 μg, 95 μg, 96 μg, 97 μg, 98 μg, 99 μg, 100 μg, 101 μg, 102 μg, 103 μg, 104 μg, 105 μg, 106 μg, 107 μg, 108 μg, 109 μg, 110 μg, 111 μg, 112 μg, 113 μg, 114 μg, 115 μg, 116 μg, 117 μg, 118 μg, 119 μg, or 120 μg; from 32 μg to: 33 μg, 34 μg, 35 μg, 36 μg, 37 μg, 38 μg, 39 μg, 40 μg, 41 μg, 42 μg, 43 μg, 44 μg, 45 μg, 46 μg, 47 μg, 48 μg, 49 μg, 50 μg, 51 μg, 52 μg, 53 μg, 54 μg, 55 μg, 56 μg, 57 μg, 58 μg, 59 μg, 60 μg, 61 μg, 62 μg, 63 μg, 64 μg, 65 μg, 66 μg, 67 μg, 68 μg, 69 μg, 70 μg, 71 μg, 72 μg, 73 μg, 74 μg, 75 μg, 76 μg, 77 μg, 78 μg, 79 μg, 80 μg, 81 μg, 82 μg, 83 μg, 84 μg, 85 μg, 86 μg, 87 μg, 88 μg, 89 μg, 90 μg, 91 μg, 92 μg, 93 μg, 94 μg, 95 μg, 96 μg, 97 μg, 98 μg, 99 μg, 100 μg, 101 μg, 102 μg, 103 μg, 104 μg, 105 μg, 106 μg, 107 μg, 108 μg, 109 μg, 110 μg, 111 μg, 112 μg, 113 μg, 114 μg, 115 μg, 116 μg, 117 μg, 118 μg, 119 μg, or 120 μg; from 33 μg to: 34 μg, 35 μg, 36 μg, 37 μg, 38 μg, 39 μg, 40 μg, 41 μg, 42 μg, 43 μg, 44 μg, 45 μg, 46 μg, 47 μg, 48 μg, 49 μg, 50 μg, 51 μg, 52 μg, 53 μg, 54 μg, 55 μg, 56 μg, 57 μg, 58 μg, 59 μg, 60 μg, 61 μg, 62 μg, 63 μg, 64 μg, 65 μg, 66 μg, 67 μg, 68 μg, 69 μg, 70 μg, 71 μg, 72 μg, 73 μg, 74 μg, 75 μg, 76 μg, 77 μg, 78 μg, 79 μg, 80 μg, 81 μg, 82 μg, 83 μg, 84 μg, 85 μg, 86 μg, 87 μg, 88 μg, 89 μg, 90 μg, 91 μg, 92 μg, 93 μg, 94 μg, 95 μg, 96 μg, 97 μg, 98 μg, 99 μg, 100 μg, 101 μg, 102 μg, 103 μg, 104 μg, 105 μg, 106 μg, 107 μg, 108 μg, 109 μg, 110 μg, 111 μg, 112 μg, 113 μg, 114 μg, 115 μg, 116 μg, 117 μg, 118 μg, 119 μg, or 120 μg; from 34 μg to: 35 μg, 36 μg, 37 μg, 38 μg, 39 μg, 40 μg, 41 μg, 42 μg, 43 μg, 44 μg, 45 μg, 46 μg, 47 μg, 48 μg, 49 μg, 50 μg, 51 μg, 52 μg, 53 μg, 54 μg, 55 μg, 56 μg, 57 μg, 58 μg, 59 μg, 60 μg, 61 μg, 62 μg, 63 μg, 64 μg, 65 μg, 66 μg, 67 μg, 68 μg, 69 μg, 70 μg, 71 μg, 72 μg, 73 μg, 74 μg, 75 μg, 76 μg, 77 μg, 78 μg, 79 μg, 80 μg, 81 μg, 82 μg, 83 μg, 84 μg, 85 μg, 86 μg, 87 μg, 88 μg, 89 μg, 90 μg, 91 μg, 92 μg, 93 μg, 94 μg, 95 μg, 96 μg, 97 μg, 98 μg, 99 μg, 100 μg, 101 μg, 102 μg, 103 μg, 104 μg, 105 μg, 106 μg, 107 μg, 108 μg, 109 μg, 110 μg, 111 μg, 112 μg, 113 μg, 114 μg, 115 μg, 116 μg, 117 μg, 118 μg, 119 μg, or 120 μg; from 35 μg to: 36 μg, 37 μg, 38 μg, 39 μg, 40 μg, 41 μg, 42 μg, 43 μg, 44 μg, 45 μg, 46 μg, 47 μg, 48 μg, 49 μg, 50 μg, 51 μg, 52 μg, 53 μg, 54 μg, 55 μg, 56 μg, 57 μg, 58 μg, 59 μg, 60 μg, 61 μg, 62 μg, 63 μg, 64 μg, 65 μg, 66 μg, 67 μg, 68 μg, 69 μg, 70 μg, 71 μg, 72 μg, 73 μg, 74 μg, 75 μg, 76 μg, 77 μg, 78 μg, 79 μg, 80 μg, 81 μg, 82 μg, 83 μg, 84 μg, 85 μg, 86 μg, 87 μg, 88 μg, 89 μg, 90 μg, 91 μg, 92 μg, 93 μg, 94 μg, 95 μg, 96 μg, 97 μg, 98 μg, 99 μg, 100 μg, 101 μg, 102 μg, 103 μg, 104 μg, 105 μg, 106 μg, 107 μg, 108 μg, 109 μg, 110 μg, 111 μg, 112 μg, 113 μg, 114 μg, 115 μg, 116 μg, 117 μg, 118 μg, 119 μg, or 120 μg; from 36 μg to: 37 μg, 38 μg, 39 μg, 40 μg, 41 μg, 42 μg, 43 μg, 44 μg, 45 μg, 46 μg, 47 μg, 48 μg, 49 μg, 50 μg, 51 μg, 52 μg, 53 μg, 54 μg, 55 μg, 56 μg, 57 μg, 58 μg, 59 μg, 60 μg, 61 μg, 62 μg, 63 μg, 64 μg, 65 μg, 66 μg, 67 μg, 68 μg, 69 μg, 70 μg, 71 μg, 72 μg, 73 μg, 74 μg, 75 μg, 76 μg, 77 μg, 78 μg, 79 μg, 80 μg, 81 μg, 82 μg, 83 μg, 84 μg, 85 μg, 86 μg, 87 μg, 88 μg, 89 μg, 90 μg, 91 μg, 92 μg, 93 μg, 94 μg, 95 μg, 96 μg, 97 μg, 98 μg, 99 μg, 100 μg, 101 μg, 102 μg, 103 μg, 104 μg, 105 μg, 106 μg, 107 μg, 108 μg, 109 μg, 110 μg, 111 μg, 112 μg, 113 μg, 114 μg, 115 μg, 116 μg, 117 μg, 118 μg, 119 μg, or 120 μg; from 37 μg to: 38 μg, 39 μg, 40 μg, 41 μg, 42 μg, 43 μg, 44 μg, 45 μg, 46 μg, 47 μg, 48 μg, 49 μg, 50 μg, 51 μg, 52 μg, 53 μg, 54 μg, 55 μg, 56 μg, 57 μg, 58 μg, 59 μg, 60 μg, 61 μg, 62 μg, 63 μg, 64 μg, 65 μg, 66 μg, 67 μg, 68 μg, 69 μg, 70 μg, 71 μg, 72 μg, 73 μg, 74 μg, 75 μg, 76 μg, 77 μg, 78 μg, 79 μg, 80 μg, 81 μg, 82 μg, 83 μg, 84 μg, 85 μg, 86 μg, 87 μg, 88 μg, 89 μg, 90 μg, 91 μg, 92 μg, 93 μg, 94 μg, 95 μg, 96 μg, 97 μg, 98 μg, 99 μg, 100 μg, 101 μg, 102 μg, 103 μg, 104 μg, 105 μg, 106 μg, 107 μg, 108 μg, 109 μg, 110 μg, 111 μg, 112 μg, 113 μg, 114 μg, 115 μg, 116 μg, 117 μg, 118 μg, 119 μg, or 120 μg; from 38 μg to: 39 μg, 40 μg, 41 μg, 42 μg, 43 μg, 44 μg, 45 μg, 46 μg, 47 μg, 48 μg, 49 μg, 50 μg, 51 μg, 52 μg, 53 μg, 54 μg, 55 μg, 56 μg, 57 μg, 58 μg, 59 μg, 60 μg, 61 μg, 62 μg, 63 μg, 64 μg, 65 μg, 66 μg, 67 μg, 68 μg, 69 μg, 70 μg, 71 μg, 72 μg, 73 μg, 74 μg, 75 μg, 76 μg, 77 μg, 78 μg, 79 μg, 80 μg, 81 μg, 82 μg, 83 μg, 84 μg, 85 μg, 86 μg, 87 μg, 88 μg, 89 μg, 90 μg, 91 μg, 92 μg, 93 μg, 94 μg, 95 μg, 96 μg, 97 μg, 98 μg, 99 μg, 100 μg, 101 μg, 102 μg, 103 μg, 104 μg, 105 μg, 106 μg, 107 μg, 108 μg, 109 μg, 110 μg, 111 μg, 112 μg, 113 μg, 114 μg, 115 μg, 116 μg, 117 μg, 118 μg, 119 μg, or 120 μg; from 39 μg to: 40 μg, 41 μg, 42 μg, 43 μg, 44 μg, 45 μg, 46 μg, 47 μg, 48 μg, 49 μg, 50 μg, 51 μg, 52 μg, 53 μg, 54 μg, 55 μg, 56 μg, 57 μg, 58 μg, 59 μg, 60 μg, 61 μg, 62 μg, 63 μg, 64 μg, 65 μg, 66 μg, 67 μg, 68 μg, 69 μg, 70 μg, 71 μg, 72 μg, 73 μg, 74 μg, 75 μg, 76 μg, 77 μg, 78 μg, 79 μg, 80 μg, 81 μg, 82 μg, 83 μg, 84 μg, 85 μg, 86 μg, 87 μg, 88 μg, 89 μg, 90 μg, 91 μg, 92 μg, 93 μg, 94 μg, 95 μg, 96 μg, 97 μg, 98 μg, 99 μg, 100 μg, 101 μg, 102 μg, 103 μg, 104 μg, 105 μg, 106 μg, 107 μg, 108 μg, 109 μg, 110 μg, 111 μg, 112 μg, 113 μg, 114 μg, 115 μg, 116 μg, 117 μg, 118 μg, 119 μg, or 120 μg; from 40 μg to: 41 μg, 42 μg, 43 μg, 44 μg, 45 μg, 46 μg, 47 μg, 48 μg, 49 μg, 50 μg, 51 μg, 52 μg, 53 μg, 54 μg, 55 μg, 56 μg, 57 μg, 58 μg, 59 μg, 60 μg, 61 μg, 62 μg, 63 μg, 64 μg, 65 μg, 66 μg, 67 μg, 68 μg, 69 μg, 70 μg, 71 μg, 72 μg, 73 μg, 74 μg, 75 μg, 76 μg, 77 μg, 78 μg, 79 μg, 80 μg, 81 μg, 82 μg, 83 μg, 84 μg, 85 μg, 86 μg, 87 μg, 88 μg, 89 μg, 90 μg, 91 μg, 92 μg, 93 μg, 94 μg, 95 μg, 96 μg, 97 μg, 98 μg, 99 μg, 100 μg, 101 μg, 102 μg, 103 μg, 104 μg, 105 μg, 106 μg, 107 μg, 108 μg, 109 μg, 110 μg, 111 μg, 112 μg, 113 μg, 114 μg, 115 μg, 116 μg, 117 μg, 118 μg, 119 μg, or 120 μg; from 41 μg to: 41 μg, 42 μg, 43 μg, 44 μg, 45 μg, 46 μg, 47 μg, 48 μg, 49 μg, 50 μg, 51 μg, 52 μg, 53 μg, 54 μg, 55 μg, 56 μg, 57 μg, 58 μg, 59 μg, 60 μg, 61 μg, 62 μg, 63 μg, 64 μg, 65 μg, 66 μg, 67 μg, 68 μg, 69 μg, 70 μg, 71 μg, 72 μg, 73 μg, 74 μg, 75 μg, 76 μg, 77 μg, 78 μg, 79 μg, 80 μg, 81 μg, 82 μg, 83 μg, 84 μg, 85 μg, 86 μg, 87 μg, 88 μg, 89 μg, 90 μg, 91 μg, 92 μg, 93 μg, 94 μg, 95 μg, 96 μg, 97 μg, 98 μg, 99 μg, 100 μg, 101 μg, 102 μg, 103 μg, 104 μg, 105 μg, 106 μg, 107 μg, 108 μg, 109 μg, 110 μg, 111 μg, 112 μg, 113 μg, 114 μg, 115 μg, 116 μg, 117 μg, 118 μg, 119 μg, or 120 μg; from 42 μg to: 43 μg, 44 μg, 45 μg, 46 μg, 47 μg, 48 μg, 49 μg, 50 μg, 51 μg, 52 μg, 53 μg, 54 μg, 55 μg, 56 μg, 57 μg, 58 μg, 59 μg, 60 μg, 61 μg, 62 μg, 63 μg, 64 μg, 65 μg, 66 μg, 67 μg, 68 μg, 69 μg, 70 μg, 71 μg, 72 μg, 73 μg, 74 μg, 75 μg, 76 μg, 77 μg, 78 μg, 79 μg, 80 μg, 81 μg, 82 μg, 83 μg, 84 μg, 85 μg, 86 μg, 87 μg, 88 μg, 89 μg, 90 μg, 91 μg, 92 μg, 93 μg, 94 μg, 95 μg, 96 μg, 97 μg, 98 μg, 99 μg, 100 μg, 101 μg, 102 μg, 103 μg, 104 μg, 105 μg, 106 μg, 107 μg, 108 μg, 109 μg, 110 μg, 111 μg, 112 μg, 113 μg, 114 μg, 115 μg, 116 μg, 117 μg, 118 μg, 119 μg, or 120 μg; from 43 μg to: 44 μg, 45 μg, 46 μg, 47 μg, 48 μg, 49 μg, 50 μg, 51 μg, 52 μg, 53 μg, 54 μg, 55 μg, 56 μg, 57 μg, 58 μg, 59 μg, 60 μg, 61 μg, 62 μg, 63 μg, 64 μg, 65 μg, 66 μg, 67 μg, 68 μg, 69 μg, 70 μg, 71 μg, 72 μg, 73 μg, 74 μg, 75 μg, 76 μg, 77 μg, 78 μg, 79 μg, 80 μg, 81 μg, 82 μg, 83 μg, 84 μg, 85 μg, 86 μg, 87 μg, 88 μg, 89 μg, 90 μg, 91 μg, 92 μg, 93 μg, 94 μg, 95 μg, 96 μg, 97 μg, 98 μg, 99 μg, 100 μg, 101 μg, 102 μg, 103 μg, 104 μg, 105 μg, 106 μg, 107 μg, 108 μg, 109 μg, 110 μg, 111 μg, 112 μg, 113 μg, 114 μg, 115 μg, 116 μg, 117 μg, 118 μg, 119 μg, or 120 μg; from 44 μg to: 45 μg, 46 μg, 47 μg, 48 μg, 49 μg, 50 μg, 51 μg, 52 μg, 53 μg, 54 μg, 55 μg, 56 μg, 57 μg, 58 μg, 59 μg, 60 μg, 61 μg, 62 μg, 63 μg, 64 μg, 65 μg, 66 μg, 67 μg, 68 μg, 69 μg, 70 μg, 71 μg, 72 μg, 73 μg, 74 μg, 75 μg, 76 μg, 77 μg, 78 μg, 79 μg, 80 μg, 81 μg, 82 μg, 83 μg, 84 μg, 85 μg, 86 μg, 87 μg, 88 μg, 89 μg, 90 μg, 91 μg, 92 μg, 93 μg, 94 μg, 95 μg, 96 μg, 97 μg, 98 μg, 99 μg, 100 μg, 101 μg, 102 μg, 103 μg, 104 μg, 105 μg, 106 μg, 107 μg, 108 μg, 109 μg, 110 μg, 111 μg, 112 μg, 113 μg, 114 μg, 115 μg, 116 μg, 117 μg, 118 μg, 119 μg, or 120 μg; from 45 μg to: 46 μg, 47 μg, 48 μg, 49 μg, 50 μg, 51 μg, 52 μg, 53 μg, 54 μg, 55 μg, 56 μg, 57 μg, 58 μg, 59 μg, 60 μg, 61 μg, 62 μg, 63 μg, 64 μg, 65 μg, 66 μg, 67 μg, 68 μg, 69 μg, 70 μg, 71 μg, 72 μg, 73 μg, 74 μg, 75 μg, 76 μg, 77 μg, 78 μg, 79 μg, 80 μg, 81 μg, 82 μg, 83 μg, 84 μg, 85 μg, 86 μg, 87 μg, 88 μg, 89 μg, 90 μg, 91 μg, 92 μg, 93 μg, 94 μg, 95 μg, 96 μg, 97 μg, 98 μg, 99 μg, 100 μg, 101 μg, 102 μg, 103 μg, 104 μg, 105 μg, 106 μg, 107 μg, 108 μg, 109 μg, 110 μg, 111 μg, 112 μg, 113 μg, 114 μg, 115 μg, 116 μg, 117 μg, 118 μg, 119 μg, or 120 μg; from 46 μg to: 47 μg, 48 μg, 49 μg, 50 μg, 51 μg, 52 μg, 53 μg, 54 μg, 55 μg, 56 μg, 57 μg, 58 μg, 59 μg, 60 μg, 61 μg, 62 μg, 63 μg, 64 μg, 65 μg, 66 μg, 67 μg, 68 μg, 69 μg, 70 μg, 71 μg, 72 μg, 73 μg, 74 μg, 75 μg, 76 μg, 77 μg, 78 μg, 79 μg, 80 μg, 81 μg, 82 μg, 83 μg, 84 μg, 85 μg, 86 μg, 87 μg, 88 μg, 89 μg, 90 μg, 91 μg, 92 μg, 93 μg, 94 μg, 95 μg, 96 μg, 97 μg, 98 μg, 99 μg, 100 μg, 101 μg, 102 μg, 103 μg, 104 μg, 105 μg, 106 μg, 107 μg, 108 μg, 109 μg, 110 μg, 111 μg, 112 μg, 113 μg, 114 μg, 115 μg, 116 μg, 117 μg, 118 μg, 119 μg, or 120 μg; from 47 μg to: 48 μg, 49 μg, 50 μg, 51 μg, 52 μg, 53 μg, 54 μg, 55 μg, 56 μg, 57 μg, 58 μg, 59 μg, 60 μg, 61 μg, 62 μg, 63 μg, 64 μg, 65 μg, 66 μg, 67 μg, 68 μg, 69 μg, 70 μg, 71 μg, 72 μg, 73 μg, 74 μg, 75 μg, 76 μg, 77 μg, 78 μg, 79 μg, 80 μg, 81 μg, 82 μg, 83 μg, 84 μg, 85 μg, 86 μg, 87 μg, 88 μg, 89 μg, 90 μg, 91 μg, 92 μg, 93 μg, 94 μg, 95 μg, 96 μg, 97 μg, 98 μg, 99 μg, 100 μg, 101 μg, 102 μg, 103 μg, 104 μg, 105 μg, 106 μg, 107 μg, 108 μg, 109 μg, 110 μg, 111 μg, 112 μg, 113 μg, 114 μg, 115 μg, 116 μg, 117 μg, 118 μg, 119 μg, or 120 μg; from 48 μg to: 49 μg, 50 μg, 51 μg, 52 μg, 53 μg, 54 μg, 55 μg, 56 μg, 57 μg, 58 μg, 59 μg, 60 μg, 61 μg, 62 μg, 63 μg, 64 μg, 65 μg, 66 μg, 67 μg, 68 μg, 69 μg, 70 μg, 71 μg, 72 μg, 73 μg, 74 μg, 75 μg, 76 μg, 77 μg, 78 μg, 79 μg, 80 μg, 81 μg, 82 μg, 83 μg, 84 μg, 85 μg, 86 μg, 87 μg, 88 μg, 89 μg, 90 μg, 91 μg, 92 μg, 93 μg, 94 μg, 95 μg, 96 μg, 97 μg, 98 μg, 99 μg, 100 μg, 101 μg, 102 μg, 103 μg, 104 μg, 105 μg, 106 μg, 107 μg, 108 μg, 109 μg, 110 μg, 111 μg, 112 μg, 113 μg, 114 μg, 115 μg, 116 μg, 117 μg, 118 μg, 119 μg, or 120 μg; from 49 μg to: 50 μg, 51 μg, 52 μg, 53 μg, 54 μg, 55 μg, 56 μg, 57 μg, 58 μg, 59 μg, 60 μg, 61 μg, 62 μg, 63 μg, 64 μg, 65 μg, 66 μg, 67 μg, 68 μg, 69 μg, 70 μg, 71 μg, 72 μg, 73 μg, 74 μg, 75 μg, 76 μg, 77 μg, 78 μg, 79 μg, 80 μg, 81 μg, 82 μg, 83 μg, 84 μg, 85 μg, 86 μg, 87 μg, 88 μg, 89 μg, 90 μg, 91 μg, 92 μg, 93 μg, 94 μg, 95 μg, 96 μg, 97 μg, 98 μg, 99 μg, 100 μg, 101 μg, 102 μg, 103 μg, 104 μg, 105 μg, 106 μg, 107 μg, 108 μg, 109 μg, 110 μg, 111 μg, 112 μg, 113 μg, 114 μg, 115 μg, 116 μg, 117 μg, 118 μg, 119 μg, or 120 μg; from 50 μg to: 51 μg, 52 μg, 53 μg, 54 μg, 55 μg, 56 μg, 57 μg, 58 μg, 59 μg, 60 μg, 61 μg, 62 μg, 63 μg, 64 μg, 65 μg, 66 μg, 67 μg, 68 μg, 69 μg, 70 μg, 71 μg, 72 μg, 73 μg, 74 μg, 75 μg, 76 μg, 77 μg, 78 μg, 79 μg, 80 μg, 81 μg, 82 μg, 83 μg, 84 μg, 85 μg, 86 μg, 87 μg, 88 μg, 89 μg, 90 μg, 91 μg, 92 μg, 93 μg, 94 μg, 95 μg, 96 μg, 97 μg, 98 μg, 99 μg, 100 μg, 101 μg, 102 μg, 103 μg, 104 μg, 105 μg, 106 μg, 107 μg, 108 μg, 109 μg, 110 μg, 111 μg, 112 μg, 113 μg, 114 μg, 115 μg, 116 μg, 117 μg, 118 μg, 119 μg, or 120 μg; from 51 μg to: 52 μg, 53 μg, 54 μg, 55 μg, 56 μg, 57 μg, 58 μg, 59 μg, 60 μg, 61 μg, 62 μg, 63 μg, 64 μg, 65 μg, 66 μg, 67 μg, 68 μg, 69 μg, 70 μg, 71 μg, 72 μg, 73 μg, 74 μg, 75 μg, 76 μg, 77 μg, 78 μg, 79 μg, 80 μg, 81 μg, 82 μg, 83 μg, 84 μg, 85 μg, 86 μg, 87 μg, 88 μg, 89 μg, 90 μg, 91 μg, 92 μg, 93 μg, 94 μg, 95 μg, 96 μg, 97 μg, 98 μg, 99 μg, 100 μg, 101 μg, 102 μg, 103 μg, 104 μg, 105 μg, 106 μg, 107 μg, 108 μg, 109 μg, 110 μg, 111 μg, 112 μg, 113 μg, 114 μg, 115 μg, 116 μg, 117 μg, 118 μg, 119 μg, or 120 μg; from 52 μg to: 53 μg, 54 μg, 55 μg, 56 μg, 57 μg, 58 μg, 59 μg, 60 μg, 61 μg, 62 μg, 63 μg, 64 μg, 65 μg, 66 μg, 67 μg, 68 μg, 69 μg, 70 μg, 71 μg, 72 μg, 73 μg, 74 μg, 75 μg, 76 μg, 77 μg, 78 μg, 79 μg, 80 μg, 81 μg, 82 μg, 83 μg, 84 μg, 85 μg, 86 μg, 87 μg, 88 μg, 89 μg, 90 μg, 91 μg, 92 μg, 93 μg, 94 μg, 95 μg, 96 μg, 97 μg, 98 μg, 99 μg, 100 μg, 101 μg, 102 μg, 103 μg, 104 μg, 105 μg, 106 μg, 107 μg, 108 μg, 109 μg, 110 μg, 111 μg, 112 μg, 113 μg, 114 μg, 115 μg, 116 μg, 117 μg, 118 μg, 119 μg, or 120 μg; from 53 μg to: 54 μg, 55 μg, 56 μg, 57 μg, 58 μg, 59 μg, 60 μg, 61 μg, 62 μg, 63 μg, 64 μg, 65 μg, 66 μg, 67 μg, 68 μg, 69 μg, 70 μg, 71 μg, 72 μg, 73 μg, 74 μg, 75 μg, 76 μg, 77 μg, 78 μg, 79 μg, 80 μg, 81 μg, 82 μg, 83 μg, 84 μg, 85 μg, 86 μg, 87 μg, 88 μg, 89 μg, 90 μg, 91 μg, 92 μg, 93 μg, 94 μg, 95 μg, 96 μg, 97 μg, 98 μg, 99 μg, 100 μg, 101 μg, 102 μg, 103 μg, 104 μg, 105 μg, 106 μg, 107 μg, 108 μg, 109 μg, 110 μg, 111 μg, 112 μg, 113 μg, 114 μg, 115 μg, 116 μg, 117 μg, 118 μg, 119 μg, or 120 μg; from 54 μg to: 55 μg, 56 μg, 57 μg, 58 μg, 59 μg, 60 μg, 61 μg, 62 μg, 63 μg, 64 μg, 65 μg, 66 μg, 67 μg, 68 μg, 69 μg, 70 μg, 71 μg, 72 μg, 73 μg, 74 μg, 75 μg, 76 μg, 77 μg, 78 μg, 79 μg, 80 μg, 81 μg, 82 μg, 83 μg, 84 μg, 85 μg, 86 μg, 87 μg, 88 μg, 89 μg, 90 μg, 91 μg, 92 μg, 93 μg, 94 μg, 95 μg, 96 μg, 97 μg, 98 μg, 99 μg, 100 μg, 101 μg, 102 μg, 103 μg, 104 μg, 105 μg, 106 μg, 107 μg, 108 μg, 109 μg, 110 μg, 111 μg, 112 μg, 113 μg, 114 μg, 115 μg, 116 μg, 117 μg, 118 μg, 119 μg, or 120 μg; from 55 μg to: 56 μg, 57 μg, 58 μg, 59 μg, 60 μg, 61 μg, 62 μg, 63 μg, 64 μg, 65 μg, 66 μg, 67 μg, 68 μg, 69 μg, 70 μg, 71 μg, 72 μg, 73 μg, 74 μg, 75 μg, 76 μg, 77 μg, 78 μg, 79 μg, 80 μg, 81 μg, 82 μg, 83 μg, 84 μg, 85 μg, 86 μg, 87 μg, 88 μg, 89 μg, 90 μg, 91 μg, 92 μg, 93 μg, 94 μg, 95 μg, 96 μg, 97 μg, 98 μg, 99 μg, 100 μg, 101 μg, 102 μg, 103 μg, 104 μg, 105 μg, 106 μg, 107 μg, 108 μg, 109 μg, 110 μg, 111 μg, 112 μg, 113 μg, 114 μg, 115 μg, 116 μg, 117 μg, 118 μg, 119 μg, or 120 μg; from 56 μg to: 57 μg, 58 μg, 59 μg, 60 μg, 61 μg, 62 μg, 63 μg, 64 μg, 65 μg, 66 μg, 67 μg, 68 μg, 69 μg, 70 μg, 71 μg, 72 μg, 73 μg, 74 μg, 75 μg, 76 μg, 77 μg, 78 μg, 79 μg, 80 μg, 81 μg, 82 μg, 83 μg, 84 μg, 85 μg, 86 μg, 87 μg, 88 μg, 89 μg, 90 μg, 91 μg, 92 μg, 93 μg, 94 μg, 95 μg, 96 μg, 97 μg, 98 μg, 99 μg, 100 μg, 101 μg, 102 μg, 103 μg, 104 μg, 105 μg, 106 μg, 107 μg, 108 μg, 109 μg, 110 μg, 111 μg, 112 μg, 113 μg, 114 μg, 115 μg, 116 μg, 117 μg, 118 μg, 119 μg, or 120 μg; from 57 μg to: 58 μg, 59 μg, 60 μg, 61 μg, 62 μg, 63 μg, 64 μg, 65 μg, 66 μg, 67 μg, 68 μg, 69 μg, 70 μg, 71 μg, 72 μg, 73 μg, 74 μg, 75 μg, 76 μg, 77 μg, 78 μg, 79 μg, 80 μg, 81 μg, 82 μg, 83 μg, 84 μg, 85 μg, 86 μg, 87 μg, 88 μg, 89 μg, 90 μg, 91 μg, 92 μg, 93 μg, 94 μg, 95 μg, 96 μg, 97 μg, 98 μg, 99 μg, 100 μg, 101 μg, 102 μg, 103 μg, 104 μg, 105 μg, 106 μg, 107 μg, 108 μg, 109 μg, 110 μg, 111 μg, 112 μg, 113 μg, 114 μg, 115 μg, 116 μg, 117 μg, 118 μg, 119 μg, or 120 μg; from 58 μg to: 59 μg, 60 μg, 61 μg, 62 μg, 63 μg, 64 μg, 65 μg, 66 μg, 67 μg, 68 μg, 69 μg, 70 μg, 71 μg, 72 μg, 73 μg, 74 μg, 75 μg, 76 μg, 77 μg, 78 μg, 79 μg, 80 μg, 81 μg, 82 μg, 83 μg, 84 μg, 85 μg, 86 μg, 87 μg, 88 μg, 89 μg, 90 μg, 91 μg, 92 μg, 93 μg, 94 μg, 95 μg, 96 μg, 97 μg, 98 μg, 99 μg, 100 μg, 101 μg, 102 μg, 103 μg, 104 μg, 105 μg, 106 μg, 107 μg, 108 μg, 109 μg, 110 μg, 111 μg, 112 μg, 113 μg, 114 μg, 115 μg, 116 μg, 117 μg, 118 μg, 119 μg, or 120 μg; from 59 μg to:60 μg, 61 μg, 62 μg, 63 μg, 64 μg, 65 μg, 66 μg, 67 μg, 68 μg, 69 μg, 70 μg, 71 μg, 72 μg, 73 μg, 74 μg, 75 μg, 76 μg, 77 μg, 78 μg, 79 μg, 80 μg, 81 μg, 82 μg, 83 μg, 84 μg, 85 μg, 86 μg, 87 μg, 88 μg, 89 μg, 90 μg, 91 μg, 92 μg, 93 μg, 94 μg, 95 μg, 96 μg, 97 μg, 98 μg, 99 μg, 100 μg, 101 μg, 102 μg, 103 μg, 104 μg, 105 μg, 106 μg, 107 μg, 108 μg, 109 μg, 110 μg, 111 μg, 112 μg, 113 μg, 114 μg, 115 μg, 116 μg, 117 μg, 118 μg, 119 μg, or 120 μg; from 60 μg to: 61 μg, 62 μg, 63 μg, 64 μg, 65 μg, 66 μg, 67 μg, 68 μg, 69 μg, 70 μg, 71 μg, 72 μg, 73 μg, 74 μg, 75 μg, 76 μg, 77 μg, 78 μg, 79 μg, 80 μg, 81 μg, 82 μg, 83 μg, 84 μg, 85 μg, 86 μg, 87 μg, 88 μg, 89 μg, 90 μg, 91 μg, 92 μg, 93 μg, 94 μg, 95 μg, 96 μg, 97 μg, 98 μg, 99 μg, 100 μg, 101 μg, 102 μg, 103 μg, 104 μg, 105 μg, 106 μg, 107 μg, 108 μg, 109 μg, 110 μg, 111 μg, 112 μg, 113 μg, 114 μg, 115 μg, 116 μg, 117 μg, 118 μg, 119 μg, or 120 μg; from 61 μg to: 62 μg, 63 μg, 64 μg, 65 μg, 66 μg, 67 μg, 68 μg, 69 μg, 70 μg, 71 μg, 72 μg, 73 μg, 74 μg, 75 μg, 76 μg, 77 μg, 78 μg, 79 μg, 80 μg, 81 μg, 82 μg, 83 μg, 84 μg, 85 μg, 86 μg, 87 μg, 88 μg, 89 μg, 90 μg, 91 μg, 92 μg, 93 μg, 94 μg, 95 μg, 96 μg, 97 μg, 98 μg, 99 μg, 100 μg, 101 μg, 102 μg, 103 μg, 104 μg, 105 μg, 106 μg, 107 μg, 108 μg, 109 μg, 110 μg, 111 μg, 112 μg, 113 μg, 114 μg, 115 μg, 116 μg, 117 μg, 118 μg, 119 μg, or 120 μg; from 62 μg to: 63 μg, 64 μg, 65 μg, 66 μg, 67 μg, 68 μg, 69 μg, 70 μg, 71 μg, 72 μg, 73 μg, 74 μg, 75 μg, 76 μg, 77 μg, 78 μg, 79 μg, 80 μg, 81 μg, 82 μg, 83 μg, 84 μg, 85 μg, 86 μg, 87 μg, 88 μg, 89 μg, 90 μg, 91 μg, 92 μg, 93 μg, 94 μg, 95 μg, 96 μg, 97 μg, 98 μg, 99 μg, 100 μg, 101 μg, 102 μg, 103 μg, 104 μg, 105 μg, 106 μg, 107 μg, 108 μg, 109 μg, 110 μg, 111 μg, 112 μg, 113 μg, 114 μg, 115 μg, 116 μg, 117 μg, 118 μg, 119 μg, or 120 μg; from 63 μg to: 64 μg, 65 μg, 66 μg, 67 μg, 68 μg, 69 μg, 70 μg, 71 μg, 72 μg, 73 μg, 74 μg, 75 μg, 76 μg, 77 μg, 78 μg, 79 μg, 80 μg, 81 μg, 82 μg, 83 μg, 84 μg, 85 μg, 86 μg, 87 μg, 88 μg, 89 μg, 90 μg, 91 μg, 92 μg, 93 μg, 94 μg, 95 μg, 96 μg, 97 μg, 98 μg, 99 μg, 100 μg, 101 μg, 102 μg, 103 μg, 104 μg, 105 μg, 106 μg, 107 μg, 108 μg, 109 μg, 110 μg, 111 μg, 112 μg, 113 μg, 114 μg, 115 μg, 116 μg, 117 μg, 118 μg, 119 μg, or 120 μg; from 64 μg to: 65 μg, 66 μg, 67 μg, 68 μg, 69 μg, 70 μg, 71 μg, 72 μg, 73 μg, 74 μg, 75 μg, 76 μg, 77 μg, 78 μg, 79 μg, 80 μg, 81 μg, 82 μg, 83 μg, 84 μg, 85 μg, 86 μg, 87 μg, 88 μg, 89 μg, 90 μg, 91 μg, 92 μg, 93 μg, 94 μg, 95 μg, 96 μg, 97 μg, 98 μg, 99 μg, 100 μg, 101 μg, 102 μg, 103 μg, 104 μg, 105 μg, 106 μg, 107 μg, 108 μg, 109 μg, 110 μg, 111 μg, 112 μg, 113 μg, 114 μg, 115 μg, 116 μg, 117 μg, 118 μg, 119 μg, or 120 μg; from 65 μg to: 66 μg, 67 μg, 68 μg, 69 μg, 70 μg, 71 μg, 72 μg, 73 μg, 74 μg, 75 μg, 76 μg, 77 μg, 78 μg, 79 μg, 80 μg, 81 μg, 82 μg, 83 μg, 84 μg, 85 μg, 86 μg, 87 μg, 88 μg, 89 μg, 90 μg, 91 μg, 92 μg, 93 μg, 94 μg, 95 μg, 96 μg, 97 μg, 98 μg, 99 μg, 100 μg, 101 μg, 102 μg, 103 μg, 104 μg, 105 μg, 106 μg, 107 μg, 108 μg, 109 μg, 110 μg, 111 μg, 112 μg, 113 μg, 114 μg, 115 μg, 116 μg, 117 μg, 118 μg, 119 μg, or 120 μg; from 66 μg to: 67 μg, 68 μg, 69 μg, 70 μg, 71 μg, 72 μg, 73 μg, 74 μg, 75 μg, 76 μg, 77 μg, 78 μg, 79 μg, 80 μg, 81 μg, 82 μg, 83 μg, 84 μg, 85 μg, 86 μg, 87 μg, 88 μg, 89 μg, 90 μg, 91 μg, 92 μg, 93 μg, 94 μg, 95 μg, 96 μg, 97 μg, 98 μg, 99 μg, 100 μg, 101 μg, 102 μg, 103 μg, 104 μg, 105 μg, 106 μg, 107 μg, 108 μg, 109 μg, 110 μg, 111 μg, 112 μg, 113 μg, 114 μg, 115 μg, 116 μg, 117 μg, 118 μg, 119 μg, or 120 μg; from 67 μg to: 68 μg, 69 μg, 70 μg, 71 μg, 72 μg, 73 μg, 74 μg, 75 μg, 76 μg, 77 μg, 78 μg, 79 μg, 80 μg, 81 μg, 82 μg, 83 μg, 84 μg, 85 μg, 86 μg, 87 μg, 88 μg, 89 μg, 90 μg, 91 μg, 92 μg, 93 μg, 94 μg, 95 μg, 96 μg, 97 μg, 98 μg, 99 μg, 100 μg, 101 μg, 102 μg, 103 μg, 104 μg, 105 μg, 106 μg, 107 μg, 108 μg, 109 μg, 110 μg, 111 μg, 112 μg, 113 μg, 114 μg, 115 μg, 116 μg, 117 μg, 118 μg, 119 μg, or 120 μg; from 68 μg to: 69 μg 70 μg, 71 μg, 72 μg, 73 μg, 74 μg, 75 μg, 76 μg, 77 μg, 78 μg, 79 μg, 80 μg, 81 μg, 82 μg, 83 μg, 84 μg, 85 μg, 86 μg, 87 μg, 88 μg, 89 μg, 90 μg, 91 μg, 92 μg, 93 μg, 94 μg, 95 μg, 96 μg, 97 μg, 98 μg, 99 μg, 100 μg, 101 μg, 102 μg, 103 μg, 104 μg, 105 μg, 106 μg, 107 μg, 108 μg, 109 μg, 110 μg, 111 μg, 112 μg, 113 μg, 114 μg, 115 μg, 116 μg, 117 μg, 118 μg, 119 μg, or 120 μg; from 69 μg to: 70 μg, 71 μg, 72 μg, 73 μg, 74 μg, 75 μg, 76 μg, 77 μg, 78 μg, 79 μg, 80 μg, 81 μg, 82 μg, 83 μg, 84 μg, 85 μg, 86 μg, 87 μg, 88 μg, 89 μg, 90 μg, 91 μg, 92 μg, 93 μg, 94 μg, 95 μg, 96 μg, 97 μg, 98 μg, 99 μg, 100 μg, 101 μg, 102 μg, 103 μg, 104 μg, 105 μg, 106 μg, 107 μg, 108 μg, 109 μg, 110 μg, 111 μg, 112 μg, 113 μg, 114 μg, 115 μg, 116 μg, 117 μg, 118 μg, 119 μg, or 120 μg; from 70 μg to: 71 μg, 72 μg, 73 μg, 74 μg, 75 μg, 76 μg, 77 μg, 78 μg, 79 μg, 80 μg, 81 μg, 82 μg, 83 μg, 84 μg, 85 μg, 86 μg, 87 μg, 88 μg, 89 μg, 90 μg, 91 μg, 92 μg, 93 μg, 94 μg, 95 μg, 96 μg, 97 μg, 98 μg, 99 μg, 100 μg, 101 μg, 102 μg, 103 μg, 104 μg, 105 μg, 106 μg, 107 μg, 108 μg, 109 μg, 110 μg, 111 μg, 112 μg, 113 μg, 114 μg, 115 μg, 116 μg, 117 μg, 118 μg, 119 μg, or 120 μg; from 71 μg to: 72 μg, 73 μg, 74 μg, 75 μg, 76 μg, 77 μg, 78 μg, 79 μg, 80 μg, 81 μg, 82 μg, 83 μg, 84 μg, 85 μg, 86 μg, 87 μg, 88 μg, 89 μg, 90 μg, 91 μg, 92 μg, 93 μg, 94 μg, 95 μg, 96 μg, 97 μg, 98 μg, 99 μg, 100 μg, 101 μg, 102 μg, 103 μg, 104 μg, 105 μg, 106 μg, 107 μg, 108 μg, 109 μg, 110 μg, 111 μg, 112 μg, 113 μg, 114 μg, 115 μg, 116 μg, 117 μg, 118 μg, 119 μg, or 120 μg; from 72 μg to: 73 μg, 74 μg, 75 μg, 76 μg, 77 μg, 78 μg, 79 μg, 80 μg, 81 μg, 82 μg, 83 μg, 84 μg, 85 μg, 86 μg, 87 μg, 88 μg, 89 μg, 90 μg, 91 μg, 92 μg, 93 μg, 94 μg, 95 μg, 96 μg, 97 μg, 98 μg, 99 μg, 100 μg, 101 μg, 102 μg, 103 μg, 104 μg, 105 μg, 106 μg, 107 μg, 108 μg, 109 μg, 110 μg, 111 μg, 112 μg, 113 μg, 114 μg, 115 μg, 116 μg, 117 μg, 118 μg, 119 μg, or 120 μg; from 73 μg to: 74 μg, 75 μg, 76 μg, 77 μg, 78 μg, 79 μg, 80 μg, 81 μg, 82 μg, 83 μg, 84 μg, 85 μg, 86 μg, 87 μg, 88 μg, 89 μg, 90 μg, 91 μg, 92 μg, 93 μg, 94 μg, 95 μg, 96 μg, 97 μg, 98 μg, 99 μg, 100 μg, 101 μg, 102 μg, 103 μg, 104 μg, 105 μg, 106 μg, 107 μg, 108 μg, 109 μg, 110 μg, 111 μg, 112 μg, 113 μg, 114 μg, 115 μg, 116 μg, 117 μg, 118 μg, 119 μg, or 120 μg; from 74 μg to: 75 μg, 76 μg, 77 μg, 78 μg, 79 μg, 80 μg, 81 μg, 82 μg, 83 μg, 84 μg, 85 μg, 86 μg, 87 μg, 88 μg, 89 μg, 90 μg, 91 μg, 92 μg, 93 μg, 94 μg, 95 μg, 96 μg, 97 μg, 98 μg, 99 μg, 100 μg, 101 μg, 102 μg, 103 μg, 104 μg, 105 μg, 106 μg, 107 μg, 108 μg, 109 μg, 110 μg, 111 μg, 112 μg, 113 μg, 114 μg, 115 μg, 116 μg, 117 μg, 118 μg, 119 μg, or 120 μg; from 75 μg to: 76 μg, 77 μg, 78 μg, 79 μg, 80 μg, 81 μg, 82 μg, 83 μg, 84 μg, 85 μg, 86 μg, 87 μg, 88 μg, 89 μg, 90 μg, 91 μg, 92 μg, 93 μg, 94 μg, 95 μg, 96 μg, 97 μg, 98 μg, 99 μg, 100 μg, 101 μg, 102 μg, 103 μg, 104 μg, 105 μg, 106 μg, 107 μg, 108 μg, 109 μg, 110 μg, 111 μg, 112 μg, 113 μg, 114 μg, 115 μg, 116 μg, 117 μg, 118 μg, 119 μg, or 120 μg; from 76 μg to: 77 μg, 78 μg, 79 μg, 80 μg, 81 μg, 82 μg, 83 μg, 84 μg, 85 μg, 86 μg, 87 μg, 88 μg, 89 μg, 90 μg, 91 μg, 92 μg, 93 μg, 94 μg, 95 μg, 96 μg, 97 μg, 98 μg, 99 μg, 100 μg, 101 μg, 102 μg, 103 μg, 104 μg, 105 μg, 106 μg, 107 μg, 108 μg, 109 μg, 110 μg, 111 μg, 112 μg, 113 μg, 114 μg, 115 μg, 116 μg, 117 μg, 118 μg, 119 μg, or 120 μg; from 77 μg to: 78 μg, 79 μg, 80 μg, 81 μg, 82 μg, 83 μg, 84 μg, 85 μg, 86 μg, 87 μg, 88 μg, 89 μg, 90 μg, 91 μg, 92 μg, 93 μg, 94 μg, 95 μg, 96 μg, 97 μg, 98 μg, 99 μg, 100 μg, 101 μg, 102 μg, 103 μg, 104 μg, 105 μg, 106 μg, 107 μg, 108 μg, 109 μg, 110 μg, 111 μg, 112 μg, 113 μg, 114 μg, 115 μg, 116 μg, 117 μg, 118 μg, 119 μg, or 120 μg; from 78 μg to: 79 μg, 80 μg, 81 μg, 82 μg, 83 μg, 84 μg, 85 μg, 86 μg, 87 μg, 88 μg, 89 μg, 90 μg, 91 μg, 92 μg, 93 μg, 94 μg, 95 μg, 96 μg, 97 μg, 98 μg, 99 μg, 100 μg, 101 μg, 102 μg, 103 μg, 104 μg, 105 μg, 106 μg, 107 μg, 108 μg, 109 μg, 110 μg, 111 μg, 112 μg, 113 μg, 114 μg, 115 μg, 116 μg, 117 μg, 118 μg, 119 μg, or 120 μg; from 79 μg to: 80 μg, 81 μg, 82 μg, 83 μg, 84 μg, 85 μg, 86 μg, 87 μg, 88 μg, 89 μg, 90 μg, 91 μg, 92 μg, 93 μg, 94 μg, 95 μg, 96 μg, 97 μg, 98 μg, 99 μg, 100 μg, 101 μg, 102 μg, 103 μg, 104 μg, 105 μg, 106 μg, 107 μg, 108 μg, 109 μg, 110 μg, 111 μg, 112 μg, 113 μg, 114 μg, 115 μg, 116 μg, 117 μg, 118 μg, 119 μg, or 120 μg; from 80 μg to: 81 μg, 82 μg, 83 μg, 84 μg, 85 μg, 86 μg, 87 μg, 88 μg, 89 μg, 90 μg, 91 μg, 92 μg, 93 μg, 94 μg, 95 μg, 96 μg, 97 μg, 98 μg, 99 μg, 100 μg, 101 μg, 102 μg, 103 μg, 104 μg, 105 μg, 106 μg, 107 μg, 108 μg, 109 μg, 110 μg, 111 μg, 112 μg, 113 μg, 114 μg, 115 μg, 116 μg, 117 μg, 118 μg, 119 μg, or 120 μg of recombinant RNA molecules per booster administration.

[0498] Also contemplated and supported are combinations of booster administrations of “at least” and any of the above-noted booster administrations of “no more than” with the booster administrations provided in an Example of this document. Also contemplated and supported are combinations of the booster administrations of the Example section of this document to provide a range (i.e. the booster administration from [the booster administration from example X₁] to [the booster administration from example X₂] wherein X₁ and X₂ represent any two exemplary treatments of the Examples.

[0499] In some embodiments, the immune response that the booster administration elicits comprises a cell-mediated immune response, an antibody-response (e.g. humoral immune response), a T_{H1} immune response, or a T_{H2} immune response. In some embodiments, the eliciting of the immune response by the booster administration is from an experienced immune response where the antibody response that is against the immunogen, the cell-mediated immune response that is against the immunogen, the T_{H1}immune response that is against the immunogen, or the T_{H2} immune response that is against the immunogen is unable to reduce the likelihood of at least one symptom of the disease or from being infectious to others by the disease to a cell-mediated immune response that is against the immunogen, an antibody-response (e.g. humoral immune response) that is against the immunogen, a T_{H1} immune response that is against the immunogen, or a T_{H2} immune response that is against the immunogen that reduces the likelihood of at least one symptom of the disease or the likelihood of being infectious to others by the disease. In some embodiments, the eliciting of the immune response by the booster administration is from an experienced immune response where the antibody response that is against the immunogen, the cell-mediated immune response that is against the immunogen, the T_{H1} immune response that is against the immunogen, or the T_{H2} immune response that is against the immunogen is, at the time of booster administration, able to reduce the likelihood of at least one symptom of the disease or from being infectious to others by the disease, but some time thereafter and without the booster administration, would not be able to reduce the likelihood of at least one symptom of the disease or from being infectious to others by the disease (i.e. a boosting of the duration of the immune response). In such cases, the booster administration elicits an immune response when compared to the same individual who would not have received the booster administration and who would have otherwise not been able to reduce the likelihood of at least one symptom of the disease or from being infectious to others by the disease (i.e. boosted duration). In some embodiments of such cases, the eliciting of the immune response by the booster administration comprises a renewed cell-mediated immune response that is against the immunogen, a renewed antibody-response (e.g. humoral immune response) that is against the immunogen, a renewed T_{H1} immune response that is against the immunogen, or a renewed T_{H2} immune response that is against the immunogen that reduces the likelihood of at least one symptom of the disease or the likelihood of being infectious to others by the disease during the period in which, without the booster administration, the subject would have otherwise had an increased likelihood of at least one symptom of the disease or an increased likelihood of being infectious to the disease (i.e. boosted duration). In some embodiments, the booster administration elicits an immune response that is above the immune response elicited by the primary administration. In some embodiments, the immune response that is elicited by the booster administration is an antibody response that is above that elicited by the primary administration, a cell-mediated immune response that is above that elicited by the primary administration, a T_{H1} immune response that is above that elicited by the primary administration, or a T_{H2} immune response that is above that elicited by the primary administration. In some embodiments, at least one symptom of the disease comprises death, respiratory distress, reduced blood oxygen, fever, chills, a febrile response, shortness of breath, difficulty breathing, fatigue, muscle aches, body aches, headaches, new or loss of smell, mucus production, sore throat, congestion, runny nose, nausea, vomiting, diarrhea, confusion, pressure in the chest, persistent pain, inability to wake, inability to stay awake, pale skin, gray skin, blue-colored skin, pale lips, gray lips, blue-colored lips, pale nail-beds, gray nail-beds, blue-colored nail-beds, low reperfusion of extremities, low reperfusion of the body, encephalitis, stroke, ischemia, fibromyalgia, or myocarditis.

[0500] In one aspect, a method of eliciting an immune response in a subject to an immunogen is provided, wherein the method comprises administering to the subject a unit dose of the recombinant RNA molecules or the formulation. A “unit dose” is contemplated and understood to be that dose provided in an administration, and several unit doses (i.e. the unit doses from several administrations may be combined) to make a total dose administered to the subject. In some embodiments, the immune response is a protective immune response. In some embodiments, the immune response or the protective immune response comprises a cell-mediated immune response, an antibody-response (e.g. humoral immune response), a T_{H1} immune response, or a T_{H2} immune response. In some embodiments, the immune response is a therapeutic immune response. In some embodiments, the heterologous polypeptide comprises the antibody against the immunogen. In some embodiments, the heterologous polypeptide comprises the immunogen.

[0501] In another aspect, a method of delivering to a subject a heterologous nucleic acid in the recombinant RNA or a formulation comprising the recombinant RNA is provided, wherein the method comprises administering an unit dose of the recombinant RNA.

[0502] In some embodiments, the subject is human. In some embodiments, the subject is a mammal, such as a human or a large veterinary mammal (e.g. horses, cattle, deer, goats, pigs). Where the formulation or recombinant RNA is for eliciting a protective immune response, the subject is preferably a human, such as a child (e.g. a toddler or infant), a teenager, and the recombinant RNA or the formulation comprising the recombinant RNA is formulated as a vaccine. Where the composition or recombinant RNA is used as a treatment or for therapeutic use, the human is preferably a teenager or an adult. A vaccine intended for children may also be administered to adults, with the provisio that the amount of recombinant RNA or formulation comprising the recombinant RNA may be scaled up to provide an unit dose consistent with the state of the immune system of the subject (i.e. the elderly having more difficulty eliciting certain immune responses) and the average body weight of a subject of that age or the actual body weight of the subject.

[0503] In some embodiments, the recombinant RNA or formulation comprising the recombinant RNA is administered to the subject intramuscularly, intradermally, subcutaneously, transcutaneously, topically, intraperitoneally, intrathecally, pulmonarily (i.e. inhaled), intracerebroventricularly, intravenously, intra-arterially, onto a mucosa (i.e. vaginally), buccally, sublingually, intranasally, optically, to the cornea, or into the eyeball.

[0504] In some embodiments, a method for treating cancer in a subject is provided, the subject having a tumor of the cancer, the method comprising administering to the subject the formulation comprising the recombinant RNA or the recombinant RNA or an unit dose thereof. In some embodiments, the recombinant RNA comprises a sequence that encodes a heterologous polypeptide comprising a polyepitopic peptide comprising two or more immunogenic neo-epitopes and a linker, the linker linking the two or more immunogenic neo-epitopes, the immunogenic neo-epitopes being from a first sample comprising cells from the tumor from the subject, each neo-epitope being: (a) encoded in mRNA in the first sample, (b) occurring in a protein-coding region therein, (c) being predicted to bind to a major histocompatibility complex, and (d) being capable of introducing a difference in the amino acid sequence of the neo-epitope when compared to a reference amino acid sequence or genetic sequence predicted to encode the reference amino acid sequence obtained from a second sample from a non-cancerous cell from the subject. In some embodiments, the recombinant RNA is produced from a method comprising: obtaining a first nucleic acid sequence from the first sample, obtaining a second nucleic acid sequence from the second sample, comparing the first nucleic acid sequence to the second nucleic acid sequence thereby obtaining at least two somatic mutations present in the tumor cells, identifying from the at least two somatic mutations (a)-(d), and producing the recombinant RNA.

[0505] In one aspect, a method for treating cancer in a subject is provided, the method comprising administering to the subject the recombinant RNA, a formulation comprising the recombinant RNA, or an unit dose thereof, wherein the recombinant RNA comprises a sequence encoding a heterologous polypeptide comprising IL-12 sc, IL-15sushi, IFNα, or GM-CSF. In some embodiments, the method further comprises administering an anti-PD-1/PD-L1 checkpoint inhibitor. In some embodiments, the cancer is melanoma, head and neck squamous cell cancer (HNSCC), cutaneous squamous cell carcinoma (CSCC), or advanced anti-PD-1/PD-L1 naïve cancers thereof.

[0506] In some embodiments, a method for treating cancer in a subject is provided, the method comprising administering to the subject the recombinant RNA, a formulation comprising the recombinant RNA, or an unit dose thereof. In some embodiments, the recombinant RNA comprises a sequence encoding a heterologous polypeptide comprising autogene, cevumeran, or atezolizumag. In some embodiments, the cancer is melanoma, head and neck squamous cell cancer (HNSCC), cutaneous squamous cell carcinoma (CSCC), non-small cell lung cancer (NSCLC), or advanced anti-PD-1/PD-L1 naïve cancers thereof.

[0507] In some embodiments, the unit dose comprises or is at least: 0.1 μg, 1 μg, 2 μg, 3 μg, 4 μg, 5 μg, 6 μg, 7 μg, 8 μg, 9 μg, 10 μg, 11 μg, 12 μg, 13 μg, 14 μg, 15 μg, 16 μg, 17 μg, 18 μg, 19 μg, 20 μg, 21 μg, 22 μg, 23 μg, 24 μg, 25 μg, 26 μg, 27 μg, 28 μg, 29 μg, 30 μg, 31 μg, 32 μg, 33 μg, 34 μg, 35 μg, 36 μg, 37 μg, 38 μg, 39 μg, 40 μg, 41 μg, 42 μg, 43 μg, 44 μg, 45 μg, 46 μg, 47 μg, 48 μg, 49 μg, 50 μg, 51 μg, 52 μg, 53 μg, 54 μg, 55 μg, 56 μg, 57 μg, 58 μg, 59 μg, 60 μg, 61 μg, 62 μg, 63 μg, 64 μg, 65 μg, 66 μg, 67 μg, 68 μg, 69 μg, 70 μg, 71 μg, 72 μg, 73 μg, 74 μg, 75 μg, 76 μg, 77 μg, 78 μg, 79 μg, 80 μg, 81 μg, 82 μg, 83 μg, 84 μg, 85 μg, 86 μg, 87 μg, 88 μg, 89 μg, 90 μg, 91 μg, 92 μg, 93 μg, 94 μg, 95 μg, 96 μg, 97 μg, 98 μg, 99 μg, 100 μg, 101 μg, 102 μg, 103 μg, 104 μg, 105 μg, 106 μg, 107 μg, 108 μg, 109 μg, 110 μg, 111 μg, 112 μg, 113 μg, 114 μg, 115 μg, 116 μg, 117 μg, 118 μg, 119 μg, or 120 μg of recombinant RNA molecules. In some embodiments, the unit dose comprises or is no more than: 120 μg, 119 μg, 118 μg, 117 μg, 116 μg, 115 μg, 114 μg, 113 μg, 112 μg, 111 μg, 110 μg, 109 μg, 108 μg, 107 μg, 106 μg, 105 μg, 104 μg, 103 μg, 102 μg, 101 μg, 100 μg, 99 μg, 98 μg, 97 μg, 96 μg, 95 μg, 94 μg, 93 μg, 92 μg, 91 μg, 90 μg, 89 μg, 88 μg, 87 μg, 86 μg, 85 μg, 84 μg, 83 μg, 82 μg, 81 μg, 80 μg, 79 μg, 78 μg, 77 μg, 76 μg, 75 μg, 74 μg, 73 μg, 72 μg, 71 μg, 70 μg, 69 μg, 68 μg, 67 μg, 66 μg, 65 μg, 64 μg, 63 μg, 62 μg, 61 μg, 60 μg, 59 μg, 58 μg, 57 μg, 56 μg, 55 μg, 54 μg, 53 μg, 52 μg, 51 μg, 50 μg, 49 μg, 48 μg, 47 μg, 46 μg, 45 μg, 44 μg, 43 μg, 42 μg, 41 μg, 40 μg, 39 μg, 38 μg, 37 μg, 36 μg, 35 μg, 34 μg, 33 μg, 32 μg, 31 μg, 30 μg, 29 μg, 28 μg, 27 μg, 26 μg, 25 μg, 24 μg, 23 μg, 22 μg, 21 μg, 20 μg, 19 μg, 18 μg, 17 μg, 16 μg, or 15 μg of recombinant RNA molecules. Taking the above-noted embodiments into account, it is contemplated and supported that any of the above-noted “μg” of “at least” and any of the above-noted “μg” of “no more than” may be combined to provide an enclosed range (i.e. the unit dose comprises or is from 25 μg to 75 μg). In some embodiments, the unit dose comprises or is from 1 μg to: 2 μg, 3 μg, 4 μg, 5 μg, 6 μg, 7 μg, 8 μg, 9 μg, 10 μg, 11 μg, 12 μg, 13 μg, 14 μg, 15 μg, 16 μg, 17 μg, 18 μg, 19 μg, 20 μg, 21 μg, 22 μg, 23 μg, 24 μg, 25 μg, 26 μg, 27 μg, 28 μg, 29 μg, 30 μg, 31 μg, 32 μg, 33 μg, 34 μg, 35 μg, 36 μg, 37 μg, 38 μg, 39 μg, 40 μg, 41 μg, 42 μg, 43 μg, 44 μg, 45 μg, 46 μg, 47 μg, 48 μg, 49 μg, 50 μg, 51 μg, 52 μg, 53 μg, 54 μg, 55 μg, 56 μg, 57 μg, 58 μg, 59 μg, 60 μg, 61 μg, 62 μg, 63 μg, 64 μg, 65 μg, 66 μg, 67 μg, 68 μg, 69 μg, 70 μg, 71 μg, 72 μg, 73 μg, 74 μg, 75 μg, 76 μg, 77 μg, 78 μg, 79 μg, 80 μg, 81 μg, 82 μg, 83 μg, 84 μg, 85 μg, 86 μg, 87 μg, 88 μg, 89 μg, 90 μg, 91 μg, 92 μg, 93 μg, 94 μg, 95 μg, 96 μg, 97 μg, 98 μg, 99 μg, 100 μg, 101 μg, 102 μg, 103 μg, 104 μg, 105 μg, 106 μg, 107 μg, 108 μg, 109 μg, 110 μg, 111 μg, 112 μg, 113 μg, 114 μg, 115 μg, 116 μg, 117 μg, 118 μg, 119 μg, or 120 μg; from2 μg to: 3 μg, 4 μg, 5 μg, 6 μg, 7 μg, 8 μg, 9 μg, 10 μg, 11 μg, 12 μg, 13 μg, 14 μg, 15 μg, 16 μg, 17 μg, 18 μg, 19 μg, 20 μg, 21 μg, 22 μg, 23 μg, 24 μg, 25 μg, 26 μg, 27 μg, 28 μg, 29 μg, 30 μg, 31 μg, 32 μg, 33 μg, 34 μg, 35 μg, 36 μg, 37 μg, 38 μg, 39 μg, 40 μg, 41 μg, 42 μg, 43 μg, 44 μg, 45 μg, 46 μg, 47 μg, 48 μg, 49 μg, 50 μg, 51 μg, 52 μg, 53 μg, 54 μg, 55 μg, 56 μg, 57 μg, 58 μg, 59 μg, 60 μg, 61 μg, 62 μg, 63 μg, 64 μg, 65 μg, 66 μg, 67 μg, 68 μg, 69 μg, 70 μg, 71 μg, 72 μg, 73 μg, 74 μg, 75 μg, 76 μg, 77 μg, 78 μg, 79 μg, 80 μg, 81 μg, 82 μg, 83 μg, 84 μg, 85 μg, 86 μg, 87 μg, 88 μg, 89 μg, 90 μg, 91 μg, 92 μg, 93 μg, 94 μg, 95 μg, 96 μg, 97 μg, 98 μg, 99 μg, 100 μg, 101 μg, 102 μg, 103 μg, 104 μg, 105 μg, 106 μg, 107 μg, 108 μg, 109 μg, 110 μg, 111 μg, 112 μg, 113 μg, 114 μg, 115 μg, 116 μg, 117 μg, 118 μg, 119 μg, or 120 μg; from 3 μg to: 4 μg, 5 μg, 6 μg, 7 μg, 8 μg, 9 μg, 10 μg, 11 μg, 12 μg, 13 μg, 14 μg, 15 μg, 16 μg, 17 μg, 18 μg, 19 μg, 20 μg, 21 μg, 22 μg, 23 μg, 24 μg, 25 μg, 26 μg, 27 μg, 28 μg, 29 μg, 30 μg, 31 μg, 32 μg, 33 μg, 34 μg, 35 μg, 36 μg, 37 μg, 38 μg, 39 μg, 40 μg, 41 μg, 42 μg, 43 μg, 44 μg, 45 μg, 46 μg, 47 μg, 48 μg, 49 μg, 50 μg, 51 μg, 52 μg, 53 μg, 54 μg, 55 μg, 56 μg, 57 μg, 58 μg, 59 μg, 60 μg, 61 μg, 62 μg, 63 μg, 64 μg, 65 μg, 66 μg, 67 μg, 68 μg, 69 μg, 70 μg, 71 μg, 72 μg, 73 μg, 74 μg, 75 μg, 76 μg, 77 μg, 78 μg, 79 μg, 80 μg, 81 μg, 82 μg, 83 μg, 84 μg, 85 μg, 86 μg, 87 μg, 88 μg, 89 μg, 90 μg, 91 μg, 92 μg, 93 μg, 94 μg, 95 μg, 96 μg, 97 μg, 98 μg, 99 μg, 100 μg, 101 μg, 102 μg, 103 μg, 104 μg, 105 μg, 106 μg, 107 μg, 108 μg, 109 μg, 110 μg, 111 μg, 112 μg, 113 μg, 114 μg, 115 μg, 116 μg, 117 μg, 118 μg, 119 μg, or 120 μg; from 4 μg to: 5 μg, 6 μg, 7 μg, 8 μg, 9 μg, 10 μg, 11 μg, 12 μg, 13 μg, 14 μg, 15 μg, 16 μg, 17 μg, 18 μg, 19 μg, 20 μg, 21 μg, 22 μg, 23 μg, 24 μg, 25 μg, 26 μg, 27 μg, 28 μg, 29 μg, 30 μg, 31 μg, 32 μg, 33 μg, 34 μg, 35 μg, 36 μg, 37 μg, 38 μg, 39 μg, 40 μg, 41 μg, 42 μg, 43 μg, 44 μg, 45 μg, 46 μg, 47 μg, 48 μg, 49 μg, 50 μg, 51 μg, 52 μg, 53 μg, 54 μg, 55 μg, 56 μg, 57 μg, 58 μg, 59 μg, 60 μg, 61 μg, 62 μg, 63 μg, 64 μg, 65 μg, 66 μg, 67 μg, 68 μg, 69 μg, 70 μg, 71 μg, 72 μg, 73 μg, 74 μg, 75 μg, 76 μg, 77 μg, 78 μg, 79 μg, 80 μg, 81 μg, 82 μg, 83 μg, 84 μg, 85 μg, 86 μg, 87 μg, 88 μg, 89 μg, 90 μg, 91 μg, 92 μg, 93 μg, 94 μg, 95 μg, 96 μg, 97 μg, 98 μg, 99 μg, 100 μg, 101 μg, 102 μg, 103 μg, 104 μg, 105 μg, 106 μg, 107 μg, 108 μg, 109 μg, 110 μg, 111 μg, 112 μg, 113 μg, 114 μg, 115 μg, 116 μg, 117 μg, 118 μg, 119 μg, or 120 μg; from 5 μg to: 6 μg, 7 μg, 8 μg, 9 μg, 10 μg, 11 μg, 12 μg, 13 μg, 14 μg, 15 μg, 16 μg, 17 μg, 18 μg, 19 μg, 20 μg, 21 μg, 22 μg, 23 μg, 24 μg, 25 μg, 26 μg, 27 μg, 28 μg, 29 μg, 30 μg, 31 μg, 32 μg, 33 μg, 34 μg, 35 μg, 36 μg, 37 μg, 38 μg, 39 μg, 40 μg, 41 μg, 42 μg, 43 μg, 44 μg, 45 μg, 46 μg, 47 μg, 48 μg, 49 μg, 50 μg, 51 μg, 52 μg, 53 μg, 54 μg, 55 μg, 56 μg, 57 μg, 58 μg, 59 μg, 60 μg, 61 μg, 62 μg, 63 μg, 64 μg, 65 μg, 66 μg, 67 μg, 68 μg, 69 μg, 70 μg, 71 μg, 72 μg, 73 μg, 74 μg, 75 μg, 76 μg, 77 μg, 78 μg, 79 μg, 80 μg, 81 μg, 82 μg, 83 μg, 84 μg, 85 μg, 86 μg, 87 μg, 88 μg, 89 μg, 90 μg, 91 μg, 92 μg, 93 μg, 94 μg, 95 μg, 96 μg, 97 μg, 98 μg, 99 μg, 100 μg, 101 μg, 102 μg, 103 μg, 104 μg, 105 μg, 106 μg, 107 μg, 108 μg, 109 μg, 110 μg, 111 μg, 112 μg, 113 μg, 114 μg, 115 μg, 116 μg, 117 μg, 118 μg, 119 μg, or 120 μg; from 6 μg to: 7 μg, 8 μg, 9 μg, 10 μg, 11 μg, 12 μg, 13 μg, 14 μg, 15 μg, 16 μg, 17 μg, 18 μg, 19 μg, 20 μg, 21 μg, 22 μg, 23 μg, 24 μg, 25 μg, 26 μg, 27 μg, 28 μg, 29 μg, 30 μg, 31 μg, 32 μg, 33 μg, 34 μg, 35 μg, 36 μg, 37 μg, 38 μg, 39 μg, 40 μg, 41 μg, 42 μg, 43 μg, 44 μg, 45 μg, 46 μg, 47 μg, 48 μg, 49 μg, 50 μg, 51 μg, 52 μg, 53 μg, 54 μg, 55 μg, 56 μg, 57 μg, 58 μg, 59 μg, 60 μg, 61 μg, 62 μg, 63 μg, 64 μg, 65 μg, 66 μg, 67 μg, 68 μg, 69 μg, 70 μg, 71 μg, 72 μg, 73 μg, 74 μg, 75 μg, 76 μg, 77 μg, 78 μg, 79 μg, 80 μg, 81 μg, 82 μg, 83 μg, 84 μg, 85 μg, 86 μg, 87 μg, 88 μg, 89 μg, 90 μg, 91 μg, 92 μg, 93 μg, 94 μg, 95 μg, 96 μg, 97 μg, 98 μg, 99 μg, 100 μg, 101 μg, 102 μg, 103 μg, 104 μg, 105 μg, 106 μg, 107 μg, 108 μg, 109 μg, 110 μg, 111 μg, 112 μg, 113 μg, 114 μg, 115 μg, 116 μg, 117 μg, 118 μg, 119 μg, or 120 μg; from 8 μg to: 9 μg, 10 μg, 11 μg, 12 μg, 13 μg, 14 μg, 15 μg, 16 μg, 17 μg, 18 μg, 19 μg, 20 μg, 21 μg, 22 μg, 23 μg, 24 μg, 25 μg, 26 μg, 27 μg, 28 μg, 29 μg, 30 μg, 31 μg, 32 μg, 33 μg, 34 μg, 35 μg, 36 μg, 37 μg, 38 μg, 39 μg, 40 μg, 41 μg, 42 μg, 43 μg, 44 μg, 45 μg, 46 μg, 47 μg, 48 μg, 49 μg, 50 μg, 51 μg, 52 μg, 53 μg, 54 μg, 55 μg, 56 μg, 57 μg, 58 μg, 59 μg, 60 μg, 61 μg, 62 μg, 63 μg, 64 μg, 65 μg, 66 μg, 67 μg, 68 μg, 69 μg, 70 μg, 71 μg, 72 μg, 73 μg, 74 μg, 75 μg, 76 μg, 77 μg, 78 μg, 79 μg, 80 μg, 81 μg, 82 μg, 83 μg, 84 μg, 85 μg, 86 μg, 87 μg, 88 μg, 89 μg, 90 μg, 91 μg, 92 μg, 93 μg, 94 μg, 95 μg, 96 μg, 97 μg, 98 μg, 99 μg, 100 μg, 101 μg, 102 μg, 103 μg, 104 μg, 105 μg, 106 μg, 107 μg, 108 μg, 109 μg, 110 μg, 111 μg, 112 μg, 113 μg, 114 μg, 115 μg, 116 μg, 117 μg, 118 μg, 119 μg, or 120 μg; from 9 μg to: 10 μg, 11 μg, 12 μg, 13 μg, 14 μg, 15 μg, 16 μg, 17 μg, 18 μg, 19 μg, 20 μg, 21 μg, 22 μg, 23 μg, 24 μg, 25 μg, 26 μg, 27 μg, 28 μg, 29 μg, 30 μg, 31 μg, 32 μg, 33 μg, 34 μg, 35 μg, 36 μg, 37 μg, 38 μg, 39 μg, 40 μg, 41 μg, 42 μg, 43 μg, 44 μg, 45 μg, 46 μg, 47 μg, 48 μg, 49 μg, 50 μg, 51 μg, 52 μg, 53 μg, 54 μg, 55 μg, 56 μg, 57 μg, 58 μg, 59 μg, 60 μg, 61 μg, 62 μg, 63 μg, 64 μg, 65 μg, 66 μg, 67 μg, 68 μg, 69 μg, 70 μg, 71 μg, 72 μg, 73 μg, 74 μg, 75 μg, 76 μg, 77 μg, 78 μg, 79 μg, 80 μg, 81 μg, 82 μg, 83 μg, 84 μg, 85 μg, 86 μg, 87 μg, 88 μg, 89 μg, 90 μg, 91 μg, 92 μg, 93 μg, 94 μg, 95 μg, 96 μg, 97 μg, 98 μg, 99 μg, 100 μg, 101 μg, 102 μg, 103 μg, 104 μg, 105 μg, 106 μg, 107 μg, 108 μg, 109 μg, 110 μg, 111 μg, 112 μg, 113 μg, 114 μg, 115 μg, 116 μg, 117 μg, 118 μg, 119 μg, or 120 μg; from 10 μg to: 11 μg, 12 μg, 13 μg, 14 μg, 15 μg, 16 μg, 17 μg, 18 μg, 19 μg, 20 μg, 21 μg, 22 μg, 23 μg, 24 μg, 25 μg, 26 μg, 27 μg, 28 μg, 29 μg, 30 μg, 31 μg, 32 μg, 33 μg, 34 μg, 35 μg, 36 μg, 37 μg, 38 μg, 39 μg, 40 μg, 41 μg, 42 μg, 43 μg, 44 μg, 45 μg, 46 μg, 47 μg, 48 μg, 49 μg, 50 μg, 51 μg, 52 μg, 53 μg, 54 μg, 55 μg, 56 μg, 57 μg, 58 μg, 59 μg, 60 μg, 61 μg, 62 μg, 63 μg, 64 μg, 65 μg, 66 μg, 67 μg, 68 μg, 69 μg, 70 μg, 71 μg, 72 μg, 73 μg, 74 μg, 75 μg, 76 μg, 77 μg, 78 μg, 79 μg, 80 μg, 81 μg, 82 μg, 83 μg, 84 μg, 85 μg, 86 μg, 87 μg, 88 μg, 89 μg, 90 μg, 91 μg, 92 μg, 93 μg, 94 μg, 95 μg, 96 μg, 97 μg, 98 μg, 99 μg, 100 μg, 101 μg, 102 μg, 103 μg, 104 μg, 105 μg, 106 μg, 107 μg, 108 μg, 109 μg, 110 μg, 111 μg, 112 μg, 113 μg, 114 μg, 115 μg, 116 μg, 117 μg, 118 μg, 119 μg, or 120 μg; from 11 μg to: 12 μg, 13 μg, 14 μg, 15 μg, 16 μg, 17 μg, 18 μg, 19 μg, 20 μg, 21 μg, 22 μg, 23 μg, 24 μg, 25 μg, 26 μg, 27 μg, 28 μg, 29 μg, 30 μg, 31 μg, 32 μg, 33 μg, 34 μg, 35 μg, 36 μg, 37 μg, 38 μg, 39 μg, 40 μg, 41 μg, 42 μg, 43 μg, 44 μg, 45 μg, 46 μg, 47 μg, 48 μg, 49 μg, 50 μg, 51 μg, 52 μg, 53 μg, 54 μg, 55 μg, 56 μg, 57 μg, 58 μg, 59 μg, 60 μg, 61 μg, 62 μg, 63 μg, 64 μg, 65 μg, 66 μg, 67 μg, 68 μg, 69 μg, 70 μg, 71 μg, 72 μg, 73 μg, 74 μg, 75 μg, 76 μg, 77 μg, 78 μg, 79 μg, 80 μg, 81 μg, 82 μg, 83 μg, 84 μg, 85 μg, 86 μg, 87 μg, 88 μg, 89 μg, 90 μg, 91 μg, 92 μg, 93 μg, 94 μg, 95 μg, 96 μg, 97 μg, 98 μg, 99 μg, 100 μg, 101 μg, 102 μg, 103 μg, 104 μg, 105 μg, 106 μg, 107 μg, 108 μg, 109 μg, 110 μg, 111 μg, 112 μg, 113 μg, 114 μg, 115 μg, 116 μg, 117 μg, 118 μg, 119 μg, or 120 μg; from 12 μg to: 13 μg, 14 μg, 15 μg, 16 μg, 17 μg, 18 μg, 19 μg, 20 μg, 21 μg, 22 μg, 23 μg, 24 μg, 25 μg, 26 μg, 27 μg, 28 μg, 29 μg, 30 μg, 31 μg, 32 μg, 33 μg, 34 μg, 35 μg, 36 μg, 37 μg, 38 μg, 39 μg, 40 μg, 41 μg, 42 μg, 43 μg, 44 μg, 45 μg, 46 μg, 47 μg, 48 μg, 49 μg, 50 μg, 51 μg, 52 μg, 53 μg, 54 μg, 55 μg, 56 μg, 57 μg, 58 μg, 59 μg, 60 μg, 61 μg, 62 μg, 63 μg, 64 μg, 65 μg, 66 μg, 67 μg, 68 μg, 69 μg, 70 μg, 71 μg, 72 μg, 73 μg, 74 μg, 75 μg, 76 μg, 77 μg, 78 μg, 79 μg, 80 μg, 81 μg, 82 μg, 83 μg, 84 μg, 85 μg, 86 μg, 87 μg, 88 μg, 89 μg, 90 μg, 91 μg, 92 μg, 93 μg, 94 μg, 95 μg, 96 μg, 97 μg, 98 μg, 99 μg, 100 μg, 101 μg, 102 μg, 103 μg, 104 μg, 105 μg, 106 μg, 107 μg, 108 μg, 109 μg, 110 μg, 111 μg, 112 μg, 113 μg, 114 μg, 115 μg, 116 μg, 117 μg, 118 μg, 119 μg, or 120 μg; from 13 μg to: 14 μg, 15 μg, 16 μg, 17 μg, 18 μg, 19 μg, 20 μg, 21 μg, 22 μg, 23 μg, 24 μg, 25 μg, 26 μg, 27 μg, 28 μg, 29 μg, 30 μg, 31 μg, 32 μg, 33 μg, 34 μg, 35 μg, 36 μg, 37 μg, 38 μg, 39 μg, 40 μg, 41 μg, 42 μg, 43 μg, 44 μg, 45 μg, 46 μg, 47 μg, 48 μg, 49 μg, 50 μg, 51 μg, 52 μg, 53 μg, 54 μg, 55 μg, 56 μg, 57 μg, 58 μg, 59 μg, 60 μg, 61 μg, 62 μg, 63 μg, 64 μg, 65 μg, 66 μg, 67 μg, 68 μg, 69 μg, 70 μg, 71 μg, 72 μg, 73 μg, 74 μg, 75 μg, 76 μg, 77 μg, 78 μg, 79 μg, 80 μg, 81 μg, 82 μg, 83 μg, 84 μg, 85 μg, 86 μg, 87 μg, 88 μg, 89 μg, 90 μg, 91 μg, 92 μg, 93 μg, 94 μg, 95 μg, 96 μg, 97 μg, 98 μg, 99 μg, 100 μg, 101 μg, 102 μg, 103 μg, 104 μg, 105 μg, 106 μg, 107 μg, 108 μg, 109 μg, 110 μg, 111 μg, 112 μg, 113 μg, 114 μg, 115 μg, 116 μg, 117 μg, 118 μg, 119 μg, or 120 μg; from 14 μg to: 15 μg, 16 μg, 17 μg, 18 μg, 19 μg, 20 μg, 21 μg, 22 μg, 23 μg, 24 μg, 25 μg, 26 μg, 27 μg, 28 μg, 29 μg, 30 μg, 31 μg, 32 μg, 33 μg, 34 μg, 35 μg, 36 μg, 37 μg, 38 μg, 39 μg, 40 μg, 41 μg, 42 μg, 43 μg, 44 μg, 45 μg, 46 μg, 47 μg, 48 μg, 49 μg, 50 μg, 51 μg, 52 μg, 53 μg, 54 μg, 55 μg, 56 μg, 57 μg, 58 μg, 59 μg, 60 μg, 61 μg, 62 μg, 63 μg, 64 μg, 65 μg, 66 μg, 67 μg, 68 μg, 69 μg, 70 μg, 71 μg, 72 μg, 73 μg, 74 μg, 75 μg, 76 μg, 77 μg, 78 μg, 79 μg, 80 μg, 81 μg, 82 μg, 83 μg, 84 μg, 85 μg, 86 μg, 87 μg, 88 μg, 89 μg, 90 μg, 91 μg, 92 μg, 93 μg, 94 μg, 95 μg, 96 μg, 97 μg, 98 μg, 99 μg, 100 μg, 101 μg, 102 μg, 103 μg, 104 μg, 105 μg, 106 μg, 107 μg, 108 μg, 109 μg, 110 μg, 111 μg, 112 μg, 113 μg, 114 μg, 115 μg, 116 μg, 117 μg, 118 μg, 119 μg, or 120 μg; from 15 μg to: 16 μg, 17 μg, 18 μg, 19 μg, 20 μg, 21 μg, 22 μg, 23 μg, 24 μg, 25 μg, 26 μg, 27 μg, 28 μg, 29 μg, 30 μg, 31 μg, 32 μg, 33 μg, 34 μg, 35 μg, 36 μg, 37 μg, 38 μg, 39 μg, 40 μg, 41 μg, 42 μg, 43 μg, 44 μg, 45 μg, 46 μg, 47 μg, 48 μg, 49 μg, 50 μg, 51 μg, 52 μg, 53 μg, 54 μg, 55 μg, 56 μg, 57 μg, 58 μg, 59 μg, 60 μg, 61 μg, 62 μg, 63 μg, 64 μg, 65 μg, 66 μg, 67 μg, 68 μg, 69 μg, 70 μg, 71 μg, 72 μg, 73 μg, 74 μg, 75 μg, 76 μg, 77 μg, 78 μg, 79 μg, 80 μg, 81 μg, 82 μg, 83 μg, 84 μg, 85 μg, 86 μg, 87 μg, 88 μg, 89 μg, 90 μg, 91 μg, 92 μg, 93 μg, 94 μg, 95 μg, 96 μg, 97 μg, 98 μg, 99 μg, 100 μg, 101 μg, 102 μg, 103 μg, 104 μg, 105 μg, 106 μg, 107 μg, 108 μg, 109 μg, 110 μg, 111 μg, 112 μg, 113 μg, 114 μg, 115 μg, 116 μg, 117 μg, 118 μg, 119 μg, or 120 μg; from 16 μg to: 17 μg, 18 μg, 19 μg, 20 μg, 21 μg, 22 μg, 23 μg, 24 μg, 25 μg, 26 μg, 27 μg, 28 μg, 29 μg, 30 μg, 31 μg, 32 μg, 33 μg, 34 μg, 35 μg, 36 μg, 37 μg, 38 μg, 39 μg, 40 μg, 41 μg, 42 μg, 43 μg, 44 μg, 45 μg, 46 μg, 47 μg, 48 μg, 49 μg, 50 μg, 51 μg, 52 μg, 53 μg, 54 μg, 55 μg, 56 μg, 57 μg, 58 μg, 59 μg, 60 μg, 61 μg, 62 μg, 63 μg, 64 μg, 65 μg, 66 μg, 67 μg, 68 μg, 69 μg, 70 μg, 71 μg, 72 μg, 73 μg, 74 μg, 75 μg, 76 μg, 77 μg, 78 μg, 79 μg, 80 μg, 81 μg, 82 μg, 83 μg, 84 μg, 85 μg, 86 μg, 87 μg, 88 μg, 89 μg, 90 μg, 91 μg, 92 μg, 93 μg, 94 μg, 95 μg, 96 μg, 97 μg, 98 μg, 99 μg, 100 μg, 101 μg, 102 μg, 103 μg, 104 μg, 105 μg, 106 μg, 107 μg, 108 μg, 109 μg, 110 μg, 111 μg, 112 μg, 113 μg, 114 μg, 115 μg, 116 μg, 117 μg, 118 μg, 119 μg, or 120 μg; from 17 μg to: 18 μg, 19 μg, 20 μg, 21 μg, 22 μg, 23 μg, 24 μg, 25 μg, 26 μg, 27 μg, 28 μg, 29 μg, 30 μg, 31 μg, 32 μg, 33 μg, 34 μg, 35 μg, 36 μg, 37 μg, 38 μg, 39 μg, 40 μg, 41 μg, 42 μg, 43 μg, 44 μg, 45 μg, 46 μg, 47 μg, 48 μg, 49 μg, 50 μg, 51 μg, 52 μg, 53 μg, 54 μg, 55 μg, 56 μg, 57 μg, 58 μg, 59 μg, 60 μg, 61 μg, 62 μg, 63 μg, 64 μg, 65 μg, 66 μg, 67 μg, 68 μg, 69 μg, 70 μg, 71 μg, 72 μg, 73 μg, 74 μg, 75 μg, 76 μg, 77 μg, 78 μg, 79 μg, 80 μg, 81 μg, 82 μg, 83 μg, 84 μg, 85 μg, 86 μg, 87 μg, 88 μg, 89 μg, 90 μg, 91 μg, 92 μg, 93 μg, 94 μg, 95 μg, 96 μg, 97 μg, 98 μg, 99 μg, 100 μg, 101 μg, 102 μg, 103 μg, 104 μg, 105 μg, 106 μg, 107 μg, 108 μg, 109 μg, 110 μg, 111 μg, 112 μg, 113 μg, 114 μg, 115 μg, 116 μg, 117 μg, 118 μg, 119 μg, or 120 μg; from 18 μg to: 19 μg, 20 μg, 21 μg, 22 μg, 23 μg, 24 μg, 25 μg, 26 μg, 27 μg, 28 μg, 29 μg, 30 μg, 31 μg, 32 μg, 33 μg, 34 μg, 35 μg, 36 μg, 37 μg, 38 μg, 39 μg, 40 μg, 41 μg, 42 μg, 43 μg, 44 μg, 45 μg, 46 μg, 47 μg, 48 μg, 49 μg, 50 μg, 51 μg, 52 μg, 53 μg, 54 μg, 55 μg, 56 μg, 57 μg, 58 μg, 59 μg, 60 μg, 61 μg, 62 μg, 63 μg, 64 μg, 65 μg, 66 μg, 67 μg, 68 μg, 69 μg, 70 μg, 71 μg, 72 μg, 73 μg, 74 μg, 75 μg, 76 μg, 77 μg, 78 μg, 79 μg, 80 μg, 81 μg, 82 μg, 83 μg, 84 μg, 85 μg, 86 μg, 87 μg, 88 μg, 89 μg, 90 μg, 91 μg, 92 μg, 93 μg, 94 μg, 95 μg, 96 μg, 97 μg, 98 μg, 99 μg, 100 μg, 101 μg, 102 μg, 103 μg, 104 μg, 105 μg, 106 μg, 107 μg, 108 μg, 109 μg, 110 μg, 111 μg, 112 μg, 113 μg, 114 μg, 115 μg, 116 μg, 117 μg, 118 μg, 119 μg, or 120 μg; from 19 μg to: 20 μg, 21 μg, 22 μg, 23 μg, 24 μg, 25 μg, 26 μg, 27 μg, 28 μg, 29 μg, 30 μg, 31 μg, 32 μg, 33 μg, 34 μg, 35 μg, 36 μg, 37 μg, 38 μg, 39 μg, 40 μg, 41 μg, 42 μg, 43 μg, 44 μg, 45 μg, 46 μg, 47 μg, 48 μg, 49 μg, 50 μg, 51 μg, 52 μg, 53 μg, 54 μg, 55 μg, 56 μg, 57 μg, 58 μg, 59 μg, 60 μg, 61 μg, 62 μg, 63 μg, 64 μg, 65 μg, 66 μg, 67 μg, 68 μg, 69 μg, 70 μg, 71 μg, 72 μg, 73 μg, 74 μg, 75 μg, 76 μg, 77 μg, 78 μg, 79 μg, 80 μg, 81 μg, 82 μg, 83 μg, 84 μg, 85 μg, 86 μg, 87 μg, 88 μg, 89 μg, 90 μg, 91 μg, 92 μg, 93 μg, 94 μg, 95 μg, 96 μg, 97 μg, 98 μg, 99 μg, 100 μg, 101 μg, 102 μg, 103 μg, 104 μg, 105 μg, 106 μg, 107 μg, 108 μg, 109 μg, 110 μg, 111 μg, 112 μg, 113 μg, 114 μg, 115 μg, 116 μg, 117 μg, 118 μg, 119 μg, or 120 μg; from 20 μg to: 21 μg, 22 μg, 23 μg, 24 μg, 25 μg, 26 μg, 27 μg, 28 μg, 29 μg, 30 μg, 31 μg, 32 μg, 33 μg, 34 μg, 35 μg, 36 μg, 37 μg, 38 μg, 39 μg, 40 μg, 41 μg, 42 μg, 43 μg, 44 μg, 45 μg, 46 μg, 47 μg, 48 μg, 49 μg, 50 μg, 51 μg, 52 μg, 53 μg, 54 μg, 55 μg, 56 μg, 57 μg, 58 μg, 59 μg, 60 μg, 61 μg, 62 μg, 63 μg, 64 μg, 65 μg, 66 μg, 67 μg, 68 μg, 69 μg, 70 μg, 71 μg, 72 μg, 73 μg, 74 μg, 75 μg, 76 μg, 77 μg, 78 μg, 79 μg, 80 μg, 81 μg, 82 μg, 83 μg, 84 μg, 85 μg, 86 μg, 87 μg, 88 μg, 89 μg, 90 μg, 91 μg, 92 μg, 93 μg, 94 μg, 95 μg, 96 μg, 97 μg, 98 μg, 99 μg, 100 μg, 101 μg, 102 μg, 103 μg, 104 μg, 105 μg, 106 μg, 107 μg, 108 μg, 109 μg, 110 μg, 111 μg, 112 μg, 113 μg, 114 μg, 115 μg, 116 μg, 117 μg, 118 μg, 119 μg, or 120 μg; from 21 μg to: 22 μg, 23 μg, 24 μg, 25 μg, 26 μg, 27 μg, 28 μg, 29 μg, 30 μg, 31 μg, 32 μg, 33 μg, 34 μg, 35 μg, 36 μg, 37 μg, 38 μg, 39 μg, 40 μg, 41 μg, 42 μg, 43 μg, 44 μg, 45 μg, 46 μg, 47 μg, 48 μg, 49 μg, 50 μg, 51 μg, 52 μg, 53 μg, 54 μg, 55 μg, 56 μg, 57 μg, 58 μg, 59 μg, 60 μg, 61 μg, 62 μg, 63 μg, 64 μg, 65 μg, 66 μg, 67 μg, 68 μg, 69 μg, 70 μg, 71 μg, 72 μg, 73 μg, 74 μg, 75 μg, 76 μg, 77 μg, 78 μg, 79 μg, 80 μg, 81 μg, 82 μg, 83 μg, 84 μg, 85 μg, 86 μg, 87 μg, 88 μg, 89 μg, 90 μg, 91 μg, 92 μg, 93 μg, 94 μg, 95 μg, 96 μg, 97 μg, 98 μg, 99 μg, 100 μg, 101 μg, 102 μg, 103 μg, 104 μg, 105 μg, 106 μg, 107 μg, 108 μg, 109 μg, 110 μg, 111 μg, 112 μg, 113 μg, 114 μg, 115 μg, 116 μg, 117 μg, 118 μg, 119 μg, or 120 μg; from 22 μg to: 23 μg, 24 μg, 25 μg, 26 μg, 27 μg, 28 μg, 29 μg, 30 μg, 31 μg, 32 μg, 33 μg, 34 μg, 35 μg, 36 μg, 37 μg, 38 μg, 39 μg, 40 μg, 41 μg, 42 μg, 43 μg, 44 μg, 45 μg, 46 μg, 47 μg, 48 μg, 49 μg, 50 μg, 51 μg, 52 μg, 53 μg, 54 μg, 55 μg, 56 μg, 57 μg, 58 μg, 59 μg, 60 μg, 61 μg, 62 μg, 63 μg, 64 μg, 65 μg, 66 μg, 67 μg, 68 μg, 69 μg, 70 μg, 71 μg, 72 μg, 73 μg, 74 μg, 75 μg, 76 μg, 77 μg, 78 μg, 79 μg, 80 μg, 81 μg, 82 μg, 83 μg, 84 μg, 85 μg, 86 μg, 87 μg, 88 μg, 89 μg, 90 μg, 91 μg, 92 μg, 93 μg, 94 μg, 95 μg, 96 μg, 97 μg, 98 μg, 99 μg, 100 μg, 101 μg, 102 μg, 103 μg, 104 μg, 105 μg, 106 μg, 107 μg, 108 μg, 109 μg, 110 μg, 111 μg, 112 μg, 113 μg, 114 μg, 115 μg, 116 μg, 117 μg, 118 μg, 119 μg, or 120 μg; from 23 μg to: 24 μg, 25 μg, 26 μg, 27 μg, 28 μg, 29 μg, 30 μg, 31 μg, 32 μg, 33 μg, 34 μg, 35 μg, 36 μg, 37 μg, 38 μg, 39 μg, 40 μg, 41 μg, 42 μg, 43 μg, 44 μg, 45 μg, 46 μg, 47 μg, 48 μg, 49 μg, 50 μg, 51 μg, 52 μg, 53 μg, 54 μg, 55 μg, 56 μg, 57 μg, 58 μg, 59 μg, 60 μg, 61 μg, 62 μg, 63 μg, 64 μg, 65 μg, 66 μg, 67 μg, 68 μg, 69 μg, 70 μg, 71 μg, 72 μg, 73 μg, 74 μg, 75 μg, 76 μg, 77 μg, 78 μg, 79 μg, 80 μg, 81 μg, 82 μg, 83 μg, 84 μg, 85 μg, 86 μg, 87 μg, 88 μg, 89 μg, 90 μg, 91 μg, 92 μg, 93 μg, 94 μg, 95 μg, 96 μg, 97 μg, 98 μg, 99 μg, 100 μg, 101 μg, 102 μg, 103 μg, 104 μg, 105 μg, 106 μg, 107 μg, 108 μg, 109 μg, 110 μg, 111 μg, 112 μg, 113 μg, 114 μg, 115 μg, 116 μg, 117 μg, 118 μg, 119 μg, or 120 μg; from 24 μg to: 25 μg, 26 μg, 27 μg, 28 μg, 29 μg, 30 μg, 31 μg, 32 μg, 33 μg, 34 μg, 35 μg, 36 μg, 37 μg, 38 μg, 39 μg, 40 μg, 41 μg, 42 μg, 43 μg, 44 μg, 45 μg, 46 μg, 47 μg, 48 μg, 49 μg, 50 μg, 51 μg, 52 μg, 53 μg, 54 μg, 55 μg, 56 μg, 57 μg, 58 μg, 59 μg, 60 μg, 61 μg, 62 μg, 63 μg, 64 μg, 65 μg, 66 μg, 67 μg, 68 μg, 69 μg, 70 μg, 71 μg, 72 μg, 73 μg, 74 μg, 75 μg, 76 μg, 77 μg, 78 μg, 79 μg, 80 μg, 81 μg, 82 μg, 83 μg, 84 μg, 85 μg, 86 μg, 87 μg, 88 μg, 89 μg, 90 μg, 91 μg, 92 μg, 93 μg, 94 μg, 95 μg, 96 μg, 97 μg, 98 μg, 99 μg, 100 μg, 101 μg, 102 μg, 103 μg, 104 μg, 105 μg, 106 μg, 107 μg, 108 μg, 109 μg, 110 μg, 111 μg, 112 μg, 113 μg, 114 μg, 115 μg, 116 μg, 117 μg, 118 μg, 119 μg, or 120 μg; from 25 μg to: 26 μg, 27 μg, 28 μg, 29 μg, 30 μg, 31 μg, 32 μg, 33 μg, 34 μg, 35 μg, 36 μg, 37 μg, 38 μg, 39 μg, 40 μg, 41 μg, 42 μg, 43 μg, 44 μg, 45 μg, 46 μg, 47 μg, 48 μg, 49 μg, 50 μg, 51 μg, 52 μg, 53 μg, 54 μg, 55 μg, 56 μg, 57 μg, 58 μg, 59 μg, 60 μg, 61 μg, 62 μg, 63 μg, 64 μg, 65 μg, 66 μg, 67 μg, 68 μg, 69 μg, 70 μg, 71 μg, 72 μg, 73 μg, 74 μg, 75 μg, 76 μg, 77 μg, 78 μg, 79 μg, 80 μg, 81 μg, 82 μg, 83 μg, 84 μg, 85 μg, 86 μg, 87 μg, 88 μg, 89 μg, 90 μg, 91 μg, 92 μg, 93 μg, 94 μg, 95 μg, 96 μg, 97 μg, 98 μg, 99 μg, 100 μg, 101 μg, 102 μg, 103 μg, 104 μg, 105 μg, 106 μg, 107 μg, 108 μg, 109 μg, 110 μg, 111 μg, 112 μg, 113 μg, 114 μg, 115 μg, 116 μg, 117 μg, 118 μg, 119 μg, or 120 μg; from 26 μg to: 27 μg, 28 μg, 29 μg, 30 μg, 31 μg, 32 μg, 33 μg, 34 μg, 35 μg, 36 μg, 37 μg, 38 μg, 39 μg, 40 μg, 41 μg, 42 μg, 43 μg, 44 μg, 45 μg, 46 μg, 47 μg, 48 μg, 49 μg, 50 μg, 51 μg, 52 μg, 53 μg, 54 μg, 55 μg, 56 μg, 57 μg, 58 μg, 59 μg, 60 μg, 61 μg, 62 μg, 63 μg, 64 μg, 65 μg, 66 μg, 67 μg, 68 μg, 69 μg, 70 μg, 71 μg, 72 μg, 73 μg, 74 μg, 75 μg, 76 μg, 77 μg, 78 μg, 79 μg, 80 μg, 81 μg, 82 μg, 83 μg, 84 μg, 85 μg, 86 μg, 87 μg, 88 μg, 89 μg, 90 μg, 91 μg, 92 μg, 93 μg, 94 μg, 95 μg, 96 μg, 97 μg, 98 μg, 99 μg, 100 μg, 101 μg, 102 μg, 103 μg, 104 μg, 105 μg, 106 μg, 107 μg, 108 μg, 109 μg, 110 μg, 111 μg, 112 μg, 113 μg, 114 μg, 115 μg, 116 μg, 117 μg, 118 μg, 119 μg, or 120 μg; from 27 μg to: 28 μg, 29 μg, 30 μg, 31 μg, 32 μg, 33 μg, 34 μg, 35 μg, 36 μg, 37 μg, 38 μg, 39 μg, 40 μg, 41 μg, 42 μg, 43 μg, 44 μg, 45 μg, 46 μg, 47 μg, 48 μg, 49 μg, 50 μg, 51 μg, 52 μg, 53 μg, 54 μg, 55 μg, 56 μg, 57 μg, 58 μg, 59 μg, 60 μg, 61 μg, 62 μg, 63 μg, 64 μg, 65 μg, 66 μg, 67 μg, 68 μg, 69 μg, 70 μg, 71 μg, 72 μg, 73 μg, 74 μg, 75 μg, 76 μg, 77 μg, 78 μg, 79 μg, 80 μg, 81 μg, 82 μg, 83 μg, 84 μg, 85 μg, 86 μg, 87 μg, 88 μg, 89 μg, 90 μg, 91 μg, 92 μg, 93 μg, 94 μg, 95 μg, 96 μg, 97 μg, 98 μg, 99 μg, 100 μg, 101 μg, 102 μg, 103 μg, 104 μg, 105 μg, 106 μg, 107 μg, 108 μg, 109 μg, 110 μg, 111 μg, 112 μg, 113 μg, 114 μg, 115 μg, 116 μg, 117 μg, 118 μg, 119 μg, or 120 μg; from 28 μg to: 29 μg, 30 μg, 31 μg, 32 μg, 33 μg, 34 μg, 35 μg, 36 μg, 37 μg, 38 μg, 39 μg, 40 μg, 41 μg, 42 μg, 43 μg, 44 μg, 45 μg, 46 μg, 47 μg, 48 μg, 49 μg, 50 μg, 51 μg, 52 μg, 53 μg, 54 μg, 55 μg, 56 μg, 57 μg, 58 μg, 59 μg, 60 μg, 61 μg, 62 μg, 63 μg, 64 μg, 65 μg, 66 μg, 67 μg, 68 μg, 69 μg, 70 μg, 71 μg, 72 μg, 73 μg, 74 μg, 75 μg, 76 μg, 77 μg, 78 μg, 79 μg, 80 μg, 81 μg, 82 μg, 83 μg, 84 μg, 85 μg, 86 μg, 87 μg, 88 μg, 89 μg, 90 μg, 91 μg, 92 μg, 93 μg, 94 μg, 95 μg, 96 μg, 97 μg, 98 μg, 99 μg, 100 μg, 101 μg, 102 μg, 103 μg, 104 μg, 105 μg, 106 μg, 107 μg, 108 μg, 109 μg, 110 μg, 111 μg, 112 μg, 113 μg, 114 μg, 115 μg, 116 μg, 117 μg, 118 μg, 119 μg, or 120 μg; from 29 μg to: 30 μg, 31 μg, 32 μg, 33 μg, 34 μg, 35 μg, 36 μg, 37 μg, 38 μg, 39 μg, 40 μg, 41 μg, 42 μg, 43 μg, 44 μg, 45 μg, 46 μg, 47 μg, 48 μg, 49 μg, 50 μg, 51 μg, 52 μg, 53 μg, 54 μg, 55 μg, 56 μg, 57 μg, 58 μg, 59 μg, 60 μg, 61 μg, 62 μg, 63 μg, 64 μg, 65 μg, 66 μg, 67 μg, 68 μg, 69 μg, 70 μg, 71 μg, 72 μg, 73 μg, 74 μg, 75 μg, 76 μg, 77 μg, 78 μg, 79 μg, 80 μg, 81 μg, 82 μg, 83 μg, 84 μg, 85 μg, 86 μg, 87 μg, 88 μg, 89 μg, 90 μg, 91 μg, 92 μg, 93 μg, 94 μg, 95 μg, 96 μg, 97 μg, 98 μg, 99 μg, 100 μg, 101 μg, 102 μg, 103 μg, 104 μg, 105 μg, 106 μg, 107 μg, 108 μg, 109 μg, 110 μg, 111 μg, 112 μg, 113 μg, 114 μg, 115 μg, 116 μg, 117 μg, 118 μg, 119 μg, or 120 μg; from 30 μg to: 31 μg, 32 μg, 33 μg, 34 μg, 35 μg, 36 μg, 37 μg, 38 μg, 39 μg, 40 μg, 41 μg, 42 μg, 43 μg, 44 μg, 45 μg, 46 μg, 47 μg, 48 μg, 49 μg, 50 μg, 51 μg, 52 μg, 53 μg, 54 μg, 55 μg, 56 μg, 57 μg, 58 μg, 59 μg, 60 μg, 61 μg, 62 μg, 63 μg, 64 μg, 65 μg, 66 μg, 67 μg, 68 μg, 69 μg, 70 μg, 71 μg, 72 μg, 73 μg, 74 μg, 75 μg, 76 μg, 77 μg, 78 μg, 79 μg, 80 μg, 81 μg, 82 μg, 83 μg, 84 μg, 85 μg, 86 μg, 87 μg, 88 μg, 89 μg, 90 μg, 91 μg, 92 μg, 93 μg, 94 μg, 95 μg, 96 μg, 97 μg, 98 μg, 99 μg, 100 μg, 101 μg, 102 μg, 103 μg, 104 μg, 105 μg, 106 μg, 107 μg, 108 μg, 109 μg, 110 μg, 111 μg, 112 μg, 113 μg, 114 μg, 115 μg, 116 μg, 117 μg, 118 μg, 119 μg, or 120 μg; from 31 μg to: 32 μg, 33 μg, 34 μg, 35 μg, 36 μg, 37 μg, 38 μg, 39 μg, 40 μg, 41 μg, 42 μg, 43 μg, 44 μg, 45 μg, 46 μg, 47 μg, 48 μg, 49 μg, 50 μg, 51 μg, 52 μg, 53 μg, 54 μg, 55 μg, 56 μg, 57 μg, 58 μg, 59 μg, 60 μg, 61 μg, 62 μg, 63 μg, 64 μg, 65 μg, 66 μg, 67 μg, 68 μg, 69 μg, 70 μg, 71 μg, 72 μg, 73 μg, 74 μg, 75 μg, 76 μg, 77 μg, 78 μg, 79 μg, 80 μg, 81 μg, 82 μg, 83 μg, 84 μg, 85 μg, 86 μg, 87 μg, 88 μg, 89 μg, 90 μg, 91 μg, 92 μg, 93 μg, 94 μg, 95 μg, 96 μg, 97 μg, 98 μg, 99 μg, 100 μg, 101 μg, 102 μg, 103 μg, 104 μg, 105 μg, 106 μg, 107 μg, 108 μg, 109 μg, 110 μg, 111 μg, 112 μg, 113 μg, 114 μg, 115 μg, 116 μg, 117 μg, 118 μg, 119 μg, or 120 μg; from 32 μg to: 33 μg, 34 μg, 35 μg, 36 μg, 37 μg, 38 μg, 39 μg, 40 μg, 41 μg, 42 μg, 43 μg, 44 μg, 45 μg, 46 μg, 47 μg, 48 μg, 49 μg, 50 μg, 51 μg, 52 μg, 53 μg, 54 μg, 55 μg, 56 μg, 57 μg, 58 μg, 59 μg, 60 μg, 61 μg, 62 μg, 63 μg, 64 μg, 65 μg, 66 μg, 67 μg, 68 μg, 69 μg, 70 μg, 71 μg, 72 μg, 73 μg, 74 μg, 75 μg, 76 μg, 77 μg, 78 μg, 79 μg, 80 μg, 81 μg, 82 μg, 83 μg, 84 μg, 85 μg, 86 μg, 87 μg, 88 μg, 89 μg, 90 μg, 91 μg, 92 μg, 93 μg, 94 μg, 95 μg, 96 μg, 97 μg, 98 μg, 99 μg, 100 μg, 101 μg, 102 μg, 103 μg, 104 μg, 105 μg, 106 μg, 107 μg, 108 μg, 109 μg, 110 μg, 111 μg, 112 μg, 113 μg, 114 μg, 115 μg, 116 μg, 117 μg, 118 μg, 119 μg, or 120 μg; from 33 μg to: 34 μg, 35 μg, 36 μg, 37 μg, 38 μg, 39 μg, 40 μg, 41 μg, 42 μg, 43 μg, 44 μg, 45 μg, 46 μg, 47 μg, 48 μg, 49 μg, 50 μg, 51 μg, 52 μg, 53 μg, 54 μg, 55 μg, 56 μg, 57 μg, 58 μg, 59 μg, 60 μg, 61 μg, 62 μg, 63 μg, 64 μg, 65 μg, 66 μg, 67 μg, 68 μg, 69 μg, 70 μg, 71 μg, 72 μg, 73 μg, 74 μg, 75 μg, 76 μg, 77 μg, 78 μg, 79 μg, 80 μg, 81 μg, 82 μg, 83 μg, 84 μg, 85 μg, 86 μg, 87 μg, 88 μg, 89 μg, 90 μg, 91 μg, 92 μg, 93 μg, 94 μg, 95 μg, 96 μg, 97 μg, 98 μg, 99 μg, 100 μg, 101 μg, 102 μg, 103 μg, 104 μg, 105 μg, 106 μg, 107 μg, 108 μg, 109 μg, 110 μg, 111 μg, 112 μg, 113 μg, 114 μg, 115 μg, 116 μg, 117 μg, 118 μg, 119 μg, or 120 μg; from 34 μg to: 35 μg, 36 μg, 37 μg, 38 μg, 39 μg, 40 μg, 41 μg, 42 μg, 43 μg, 44 μg, 45 μg, 46 μg, 47 μg, 48 μg, 49 μg, 50 μg, 51 μg, 52 μg, 53 μg, 54 μg, 55 μg, 56 μg, 57 μg, 58 μg, 59 μg, 60 μg, 61 μg, 62 μg, 63 μg, 64 μg, 65 μg, 66 μg, 67 μg, 68 μg, 69 μg, 70 μg, 71 μg, 72 μg, 73 μg, 74 μg, 75 μg, 76 μg, 77 μg, 78 μg, 79 μg, 80 μg, 81 μg, 82 μg, 83 μg, 84 μg, 85 μg, 86 μg, 87 μg, 88 μg, 89 μg, 90 μg, 91 μg, 92 μg, 93 μg, 94 μg, 95 μg, 96 μg, 97 μg, 98 μg, 99 μg, 100 μg, 101 μg, 102 μg, 103 μg, 104 μg, 105 μg, 106 μg, 107 μg, 108 μg, 109 μg, 110 μg, 111 μg, 112 μg, 113 μg, 114 μg, 115 μg, 116 μg, 117 μg, 118 μg, 119 μg, or 120 μg; from 35 μg to: 36 μg, 37 μg, 38 μg, 39 μg, 40 μg, 41 μg, 42 μg, 43 μg, 44 μg, 45 μg, 46 μg, 47 μg, 48 μg, 49 μg, 50 μg, 51 μg, 52 μg, 53 μg, 54 μg, 55 μg, 56 μg, 57 μg, 58 μg, 59 μg, 60 μg, 61 μg, 62 μg, 63 μg, 64 μg, 65 μg, 66 μg, 67 μg, 68 μg, 69 μg, 70 μg, 71 μg, 72 μg, 73 μg, 74 μg, 75 μg, 76 μg, 77 μg, 78 μg, 79 μg, 80 μg, 81 μg, 82 μg, 83 μg, 84 μg, 85 μg, 86 μg, 87 μg, 88 μg, 89 μg, 90 μg, 91 μg, 92 μg, 93 μg, 94 μg, 95 μg, 96 μg, 97 μg, 98 μg, 99 μg, 100 μg, 101 μg, 102 μg, 103 μg, 104 μg, 105 μg, 106 μg, 107 μg, 108 μg, 109 μg, 110 μg, 111 μg, 112 μg, 113 μg, 114 μg, 115 μg, 116 μg, 117 μg, 118 μg, 119 μg, or 120 μg; from 36 μg to: 37 μg, 38 μg, 39 μg, 40 μg, 41 μg, 42 μg, 43 μg, 44 μg, 45 μg, 46 μg, 47 μg, 48 μg, 49 μg, 50 μg, 51 μg, 52 μg, 53 μg, 54 μg, 55 μg, 56 μg, 57 μg, 58 μg, 59 μg, 60 μg, 61 μg, 62 μg, 63 μg, 64 μg, 65 μg, 66 μg, 67 μg, 68 μg, 69 μg, 70 μg, 71 μg, 72 μg, 73 μg, 74 μg, 75 μg, 76 μg, 77 μg, 78 μg, 79 μg, 80 μg, 81 μg, 82 μg, 83 μg, 84 μg, 85 μg, 86 μg, 87 μg, 88 μg, 89 μg, 90 μg, 91 μg, 92 μg, 93 μg, 94 μg, 95 μg, 96 μg, 97 μg, 98 μg, 99 μg, 100 μg, 101 μg, 102 μg, 103 μg, 104 μg, 105 μg, 106 μg, 107 μg, 108 μg, 109 μg, 110 μg, 111 μg, 112 μg, 113 μg, 114 μg, 115 μg, 116 μg, 117 μg, 118 μg, 119 μg, or 120 μg; from 37 μg to: 38 μg, 39 μg, 40 μg, 41 μg, 42 μg, 43 μg, 44 μg, 45 μg, 46 μg, 47 μg, 48 μg, 49 μg, 50 μg, 51 μg, 52 μg, 53 μg, 54 μg, 55 μg, 56 μg, 57 μg, 58 μg, 59 μg, 60 μg, 61 μg, 62 μg, 63 μg, 64 μg, 65 μg, 66 μg, 67 μg, 68 μg, 69 μg, 70 μg, 71 μg, 72 μg, 73 μg, 74 μg, 75 μg, 76 μg, 77 μg, 78 μg, 79 μg, 80 μg, 81 μg, 82 μg, 83 μg, 84 μg, 85 μg, 86 μg, 87 μg, 88 μg, 89 μg, 90 μg, 91 μg, 92 μg, 93 μg, 94 μg, 95 μg, 96 μg, 97 μg, 98 μg, 99 μg, 100 μg, 101 μg, 102 μg, 103 μg, 104 μg, 105 μg, 106 μg, 107 μg, 108 μg, 109 μg, 110 μg, 111 μg, 112 μg, 113 μg, 114 μg, 115 μg, 116 μg, 117 μg, 118 μg, 119 μg, or 120 μg; from 38 μg to: 39 μg, 40 μg, 41 μg, 42 μg, 43 μg, 44 μg, 45 μg, 46 μg, 47 μg, 48 μg, 49 μg, 50 μg, 51 μg, 52 μg, 53 μg, 54 μg, 55 μg, 56 μg, 57 μg, 58 μg, 59 μg, 60 μg, 61 μg, 62 μg, 63 μg, 64 μg, 65 μg, 66 μg, 67 μg, 68 μg, 69 μg, 70 μg, 71 μg, 72 μg, 73 μg, 74 μg, 75 μg, 76 μg, 77 μg, 78 μg, 79 μg, 80 μg, 81 μg, 82 μg, 83 μg, 84 μg, 85 μg, 86 μg, 87 μg, 88 μg, 89 μg, 90 μg, 91 μg, 92 μg, 93 μg, 94 μg, 95 μg, 96 μg, 97 μg, 98 μg, 99 μg, 100 μg, 101 μg, 102 μg, 103 μg, 104 μg, 105 μg, 106 μg, 107 μg, 108 μg, 109 μg, 110 μg, 111 μg, 112 μg, 113 μg, 114 μg, 115 μg, 116 μg, 117 μg, 118 μg, 119 μg, or 120 μg; from 39 μg to: 40 μg, 41 μg, 42 μg, 43 μg, 44 μg, 45 μg, 46 μg, 47 μg, 48 μg, 49 μg, 50 μg, 51 μg, 52 μg, 53 μg, 54 μg, 55 μg, 56 μg, 57 μg, 58 μg, 59 μg, 60 μg, 61 μg, 62 μg, 63 μg, 64 μg, 65 μg, 66 μg, 67 μg, 68 μg, 69 μg, 70 μg, 71 μg, 72 μg, 73 μg, 74 μg, 75 μg, 76 μg, 77 μg, 78 μg, 79 μg, 80 μg, 81 μg, 82 μg, 83 μg, 84 μg, 85 μg, 86 μg, 87 μg, 88 μg, 89 μg, 90 μg, 91 μg, 92 μg, 93 μg, 94 μg, 95 μg, 96 μg, 97 μg, 98 μg, 99 μg, 100 μg, 101 μg, 102 μg, 103 μg, 104 μg, 105 μg, 106 μg, 107 μg, 108 μg, 109 μg, 110 μg, 111 μg, 112 μg, 113 μg, 114 μg, 115 μg, 116 μg, 117 μg, 118 μg, 119 μg, or 120 μg; from 40 μg to: 41 μg, 42 μg, 43 μg, 44 μg, 45 μg, 46 μg, 47 μg, 48 μg, 49 μg, 50 μg, 51 μg, 52 μg, 53 μg, 54 μg, 55 μg, 56 μg, 57 μg, 58 μg, 59 μg, 60 μg, 61 μg, 62 μg, 63 μg, 64 μg, 65 μg, 66 μg, 67 μg, 68 μg, 69 μg, 70 μg, 71 μg, 72 μg, 73 μg, 74 μg, 75 μg, 76 μg, 77 μg, 78 μg, 79 μg, 80 μg, 81 μg, 82 μg, 83 μg, 84 μg, 85 μg, 86 μg, 87 μg, 88 μg, 89 μg, 90 μg, 91 μg, 92 μg, 93 μg, 94 μg, 95 μg, 96 μg, 97 μg, 98 μg, 99 μg, 100 μg, 101 μg, 102 μg, 103 μg, 104 μg, 105 μg, 106 μg, 107 μg, 108 μg, 109 μg, 110 μg, 111 μg, 112 μg, 113 μg, 114 μg, 115 μg, 116 μg, 117 μg, 118 μg, 119 μg, or 120 μg; from 41 μg to: 41 μg, 42 μg, 43 μg, 44 μg, 45 μg, 46 μg, 47 μg, 48 μg, 49 μg, 50 μg, 51 μg, 52 μg, 53 μg, 54 μg, 55 μg, 56 μg, 57 μg, 58 μg, 59 μg, 60 μg, 61 μg, 62 μg, 63 μg, 64 μg, 65 μg, 66 μg, 67 μg, 68 μg, 69 μg, 70 μg, 71 μg, 72 μg, 73 μg, 74 μg, 75 μg, 76 μg, 77 μg, 78 μg, 79 μg, 80 μg, 81 μg, 82 μg, 83 μg, 84 μg, 85 μg, 86 μg, 87 μg, 88 μg, 89 μg, 90 μg, 91 μg, 92 μg, 93 μg, 94 μg, 95 μg, 96 μg, 97 μg, 98 μg, 99 μg, 100 μg, 101 μg, 102 μg, 103 μg, 104 μg, 105 μg, 106 μg, 107 μg, 108 μg, 109 μg, 110 μg, 111 μg, 112 μg, 113 μg, 114 μg, 115 μg, 116 μg, 117 μg, 118 μg, 119 μg, or 120 μg; from 42 μg to: 43 μg, 44 μg, 45 μg, 46 μg, 47 μg, 48 μg, 49 μg, 50 μg, 51 μg, 52 μg, 53 μg, 54 μg, 55 μg, 56 μg, 57 μg, 58 μg, 59 μg, 60 μg, 61 μg, 62 μg, 63 μg, 64 μg, 65 μg, 66 μg, 67 μg, 68 μg, 69 μg, 70 μg, 71 μg, 72 μg, 73 μg, 74 μg, 75 μg, 76 μg, 77 μg, 78 μg, 79 μg, 80 μg, 81 μg, 82 μg, 83 μg, 84 μg, 85 μg, 86 μg, 87 μg, 88 μg, 89 μg, 90 μg, 91 μg, 92 μg, 93 μg, 94 μg, 95 μg, 96 μg, 97 μg, 98 μg, 99 μg, 100 μg, 101 μg, 102 μg, 103 μg, 104 μg, 105 μg, 106 μg, 107 μg, 108 μg, 109 μg, 110 μg, 111 μg, 112 μg, 113 μg, 114 μg, 115 μg, 116 μg, 117 μg, 118 μg, 119 μg, or 120 μg; from 43 μg to: 44 μg, 45 μg, 46 μg, 47 μg, 48 μg, 49 μg, 50 μg, 51 μg, 52 μg, 53 μg, 54 μg, 55 μg, 56 μg, 57 μg, 58 μg, 59 μg, 60 μg, 61 μg, 62 μg, 63 μg, 64 μg, 65 μg, 66 μg, 67 μg, 68 μg, 69 μg, 70 μg, 71 μg, 72 μg, 73 μg, 74 μg, 75 μg, 76 μg, 77 μg, 78 μg, 79 μg, 80 μg, 81 μg, 82 μg, 83 μg, 84 μg, 85 μg, 86 μg, 87 μg, 88 μg, 89 μg, 90 μg, 91 μg, 92 μg, 93 μg, 94 μg, 95 μg, 96 μg, 97 μg, 98 μg, 99 μg, 100 μg, 101 μg, 102 μg, 103 μg, 104 μg, 105 μg, 106 μg, 107 μg, 108 μg, 109 μg, 110 μg, 111 μg, 112 μg, 113 μg, 114 μg, 115 μg, 116 μg, 117 μg, 118 μg, 119 μg, or 120 μg; from 44 μg to: 45 μg, 46 μg, 47 μg, 48 μg, 49 μg, 50 μg, 51 μg, 52 μg, 53 μg, 54 μg, 55 μg, 56 μg, 57 μg, 58 μg, 59 μg, 60 μg, 61 μg, 62 μg, 63 μg, 64 μg, 65 μg, 66 μg, 67 μg, 68 μg, 69 μg, 70 μg, 71 μg, 72 μg, 73 μg, 74 μg, 75 μg, 76 μg, 77 μg, 78 μg, 79 μg, 80 μg, 81 μg, 82 μg, 83 μg, 84 μg, 85 μg, 86 μg, 87 μg, 88 μg, 89 μg, 90 μg, 91 μg, 92 μg, 93 μg, 94 μg, 95 μg, 96 μg, 97 μg, 98 μg, 99 μg, 100 μg, 101 μg, 102 μg, 103 μg, 104 μg, 105 μg, 106 μg, 107 μg, 108 μg, 109 μg, 110 μg, 111 μg, 112 μg, 113 μg, 114 μg, 115 μg, 116 μg, 117 μg, 118 μg, 119 μg, or 120 μg; from 45 μg to: 46 μg, 47 μg, 48 μg, 49 μg, 50 μg, 51 μg, 52 μg, 53 μg, 54 μg, 55 μg, 56 μg, 57 μg, 58 μg, 59 μg, 60 μg, 61 μg, 62 μg, 63 μg, 64 μg, 65 μg, 66 μg, 67 μg, 68 μg, 69 μg, 70 μg, 71 μg, 72 μg, 73 μg, 74 μg, 75 μg, 76 μg, 77 μg, 78 μg, 79 μg, 80 μg, 81 μg, 82 μg, 83 μg, 84 μg, 85 μg, 86 μg, 87 μg, 88 μg, 89 μg, 90 μg, 91 μg, 92 μg, 93 μg, 94 μg, 95 μg, 96 μg, 97 μg, 98 μg, 99 μg, 100 μg, 101 μg, 102 μg, 103 μg, 104 μg, 105 μg, 106 μg, 107 μg, 108 μg, 109 μg, 110 μg, 111 μg, 112 μg, 113 μg, 114 μg, 115 μg, 116 μg, 117 μg, 118 μg, 119 μg, or 120 μg; from 46 μg to: 47 μg, 48 μg, 49 μg, 50 μg, 51 μg, 52 μg, 53 μg, 54 μg, 55 μg, 56 μg, 57 μg, 58 μg, 59 μg, 60 μg, 61 μg, 62 μg, 63 μg, 64 μg, 65 μg, 66 μg, 67 μg, 68 μg, 69 μg, 70 μg, 71 μg, 72 μg, 73 μg, 74 μg, 75 μg, 76 μg, 77 μg, 78 μg, 79 μg, 80 μg, 81 μg, 82 μg, 83 μg, 84 μg, 85 μg, 86 μg, 87 μg, 88 μg, 89 μg, 90 μg, 91 μg, 92 μg, 93 μg, 94 μg, 95 μg, 96 μg, 97 μg, 98 μg, 99 μg, 100 μg, 101 μg, 102 μg, 103 μg, 104 μg, 105 μg, 106 μg, 107 μg, 108 μg, 109 μg, 110 μg, 111 μg, 112 μg, 113 μg, 114 μg, 115 μg, 116 μg, 117 μg, 118 μg, 119 μg, or 120 μg; from 47 μg to: 48 μg, 49 μg, 50 μg, 51 μg, 52 μg, 53 μg, 54 μg, 55 μg, 56 μg, 57 μg, 58 μg, 59 μg, 60 μg, 61 μg, 62 μg, 63 μg, 64 μg, 65 μg, 66 μg, 67 μg, 68 μg, 69 μg, 70 μg, 71 μg, 72 μg, 73 μg, 74 μg, 75 μg, 76 μg, 77 μg, 78 μg, 79 μg, 80 μg, 81 μg, 82 μg, 83 μg, 84 μg, 85 μg, 86 μg, 87 μg, 88 μg, 89 μg, 90 μg, 91 μg, 92 μg, 93 μg, 94 μg, 95 μg, 96 μg, 97 μg, 98 μg, 99 μg, 100 μg, 101 μg, 102 μg, 103 μg, 104 μg, 105 μg, 106 μg, 107 μg, 108 μg, 109 μg, 110 μg, 111 μg, 112 μg, 113 μg, 114 μg, 115 μg, 116 μg, 117 μg, 118 μg, 119 μg, or 120 μg; from 48 μg to: 49 μg, 50 μg, 51 μg, 52 μg, 53 μg, 54 μg, 55 μg, 56 μg, 57 μg, 58 μg, 59 μg, 60 μg, 61 μg, 62 μg, 63 μg, 64 μg, 65 μg, 66 μg, 67 μg, 68 μg, 69 μg, 70 μg, 71 μg, 72 μg, 73 μg, 74 μg, 75 μg, 76 μg, 77 μg, 78 μg, 79 μg, 80 μg, 81 μg, 82 μg, 83 μg, 84 μg, 85 μg, 86 μg, 87 μg, 88 μg, 89 μg, 90 μg, 91 μg, 92 μg, 93 μg, 94 μg, 95 μg, 96 μg, 97 μg, 98 μg, 99 μg, 100 μg, 101 μg, 102 μg, 103 μg, 104 μg, 105 μg, 106 μg, 107 μg, 108 μg, 109 μg, 110 μg, 111 μg, 112 μg, 113 μg, 114 μg, 115 μg, 116 μg, 117 μg, 118 μg, 119 μg, or 120 μg; from 49 μg to: 50 μg, 51 μg, 52 μg, 53 μg, 54 μg, 55 μg, 56 μg, 57 μg, 58 μg, 59 μg, 60 μg, 61 μg, 62 μg, 63 μg, 64 μg, 65 μg, 66 μg, 67 μg, 68 μg, 69 μg, 70 μg, 71 μg, 72 μg, 73 μg, 74 μg, 75 μg, 76 μg, 77 μg, 78 μg, 79 μg, 80 μg, 81 μg, 82 μg, 83 μg, 84 μg, 85 μg, 86 μg, 87 μg, 88 μg, 89 μg, 90 μg, 91 μg, 92 μg, 93 μg, 94 μg, 95 μg, 96 μg, 97 μg, 98 μg, 99 μg, 100 μg, 101 μg, 102 μg, 103 μg, 104 μg, 105 μg, 106 μg, 107 μg, 108 μg, 109 μg, 110 μg, 111 μg, 112 μg, 113 μg, 114 μg, 115 μg, 116 μg, 117 μg, 118 μg, 119 μg, or 120 μg; from 50 μg to: 51 μg, 52 μg, 53 μg, 54 μg, 55 μg, 56 μg, 57 μg, 58 μg, 59 μg, 60 μg, 61 μg, 62 μg, 63 μg, 64 μg, 65 μg, 66 μg, 67 μg, 68 μg, 69 μg, 70 μg, 71 μg, 72 μg, 73 μg, 74 μg, 75 μg, 76 μg, 77 μg, 78 μg, 79 μg, 80 μg, 81 μg, 82 μg, 83 μg, 84 μg, 85 μg, 86 μg, 87 μg, 88 μg, 89 μg, 90 μg, 91 μg, 92 μg, 93 μg, 94 μg, 95 μg, 96 μg, 97 μg, 98 μg, 99 μg, 100 μg, 101 μg, 102 μg, 103 μg, 104 μg, 105 μg, 106 μg, 107 μg, 108 μg, 109 μg, 110 μg, 111 μg, 112 μg, 113 μg, 114 μg, 115 μg, 116 μg, 117 μg, 118 μg, 119 μg, or 120 μg; from 51 μg to: 52 μg, 53 μg, 54 μg, 55 μg, 56 μg, 57 μg, 58 μg, 59 μg, 60 μg, 61 μg, 62 μg, 63 μg, 64 μg, 65 μg, 66 μg, 67 μg, 68 μg, 69 μg, 70 μg, 71 μg, 72 μg, 73 μg, 74 μg, 75 μg, 76 μg, 77 μg, 78 μg, 79 μg, 80 μg, 81 μg, 82 μg, 83 μg, 84 μg, 85 μg, 86 μg, 87 μg, 88 μg, 89 μg, 90 μg, 91 μg, 92 μg, 93 μg, 94 μg, 95 μg, 96 μg, 97 μg, 98 μg, 99 μg, 100 μg, 101 μg, 102 μg, 103 μg, 104 μg, 105 μg, 106 μg, 107 μg, 108 μg, 109 μg, 110 μg, 111 μg, 112 μg, 113 μg, 114 μg, 115 μg, 116 μg, 117 μg, 118 μg, 119 μg, or 120 μg; from 52 μg to: 53 μg, 54 μg, 55 μg, 56 μg, 57 μg, 58 μg, 59 μg, 60 μg, 61 μg, 62 μg, 63 μg, 64 μg, 65 μg, 66 μg, 67 μg, 68 μg, 69 μg, 70 μg, 71 μg, 72 μg, 73 μg, 74 μg, 75 μg, 76 μg, 77 μg, 78 μg, 79 μg, 80 μg, 81 μg, 82 μg, 83 μg, 84 μg, 85 μg, 86 μg, 87 μg, 88 μg, 89 μg, 90 μg, 91 μg, 92 μg, 93 μg, 94 μg, 95 μg, 96 μg, 97 μg, 98 μg, 99 μg, 100 μg, 101 μg, 102 μg, 103 μg, 104 μg, 105 μg, 106 μg, 107 μg, 108 μg, 109 μg, 110 μg, 111 μg, 112 μg, 113 μg, 114 μg, 115 μg, 116 μg, 117 μg, 118 μg, 119 μg, or 120 μg; from 53 μg to: 54 μg, 55 μg, 56 μg, 57 μg, 58 μg, 59 μg, 60 μg, 61 μg, 62 μg, 63 μg, 64 μg, 65 μg, 66 μg, 67 μg, 68 μg, 69 μg, 70 μg, 71 μg, 72 μg, 73 μg, 74 μg, 75 μg, 76 μg, 77 μg, 78 μg, 79 μg, 80 μg, 81 μg, 82 μg, 83 μg, 84 μg, 85 μg, 86 μg, 87 μg, 88 μg, 89 μg, 90 μg, 91 μg, 92 μg, 93 μg, 94 μg, 95 μg, 96 μg, 97 μg, 98 μg, 99 μg, 100 μg, 101 μg, 102 μg, 103 μg, 104 μg, 105 μg, 106 μg, 107 μg, 108 μg, 109 μg, 110 μg, 111 μg, 112 μg, 113 μg, 114 μg, 115 μg, 116 μg, 117 μg, 118 μg, 119 μg, or 120 μg; from 54 μg to: 55 μg, 56 μg, 57 μg, 58 μg, 59 μg, 60 μg, 61 μg, 62 μg, 63 μg, 64 μg, 65 μg, 66 μg, 67 μg, 68 μg, 69 μg, 70 μg, 71 μg, 72 μg, 73 μg, 74 μg, 75 μg, 76 μg, 77 μg, 78 μg, 79 μg, 80 μg, 81 μg, 82 μg, 83 μg, 84 μg, 85 μg, 86 μg, 87 μg, 88 μg, 89 μg, 90 μg, 91 μg, 92 μg, 93 μg, 94 μg, 95 μg, 96 μg, 97 μg, 98 μg, 99 μg, 100 μg, 101 μg, 102 μg, 103 μg, 104 μg, 105 μg, 106 μg, 107 μg, 108 μg, 109 μg, 110 μg, 111 μg, 112 μg, 113 μg, 114 μg, 115 μg, 116 μg, 117 μg, 118 μg, 119 μg, or 120 μg; from 55 μg to: 56 μg, 57 μg, 58 μg, 59 μg, 60 μg, 61 μg, 62 μg, 63 μg, 64 μg, 65 μg, 66 μg, 67 μg, 68 μg, 69 μg, 70 μg, 71 μg, 72 μg, 73 μg, 74 μg, 75 μg, 76 μg, 77 μg, 78 μg, 79 μg, 80 μg, 81 μg, 82 μg, 83 μg, 84 μg, 85 μg, 86 μg, 87 μg, 88 μg, 89 μg, 90 μg, 91 μg, 92 μg, 93 μg, 94 μg, 95 μg, 96 μg, 97 μg, 98 μg, 99 μg, 100 μg, 101 μg, 102 μg, 103 μg, 104 μg, 105 μg, 106 μg, 107 μg, 108 μg, 109 μg, 110 μg, 111 μg, 112 μg, 113 μg, 114 μg, 115 μg, 116 μg, 117 μg, 118 μg, 119 μg, or 120 μg; from 56 μg to: 57 μg, 58 μg, 59 μg, 60 μg, 61 μg, 62 μg, 63 μg, 64 μg, 65 μg, 66 μg, 67 μg, 68 μg, 69 μg, 70 μg, 71 μg, 72 μg, 73 μg, 74 μg, 75 μg, 76 μg, 77 μg, 78 μg, 79 μg, 80 μg, 81 μg, 82 μg, 83 μg, 84 μg, 85 μg, 86 μg, 87 μg, 88 μg, 89 μg, 90 μg, 91 μg, 92 μg, 93 μg, 94 μg, 95 μg, 96 μg, 97 μg, 98 μg, 99 μg, 100 μg, 101 μg, 102 μg, 103 μg, 104 μg, 105 μg, 106 μg, 107 μg, 108 μg, 109 μg, 110 μg, 111 μg, 112 μg, 113 μg, 114 μg, 115 μg, 116 μg, 117 μg, 118 μg, 119 μg, or 120 μg; from 57 μg to: 58 μg, 59 μg, 60 μg, 61 μg, 62 μg, 63 μg, 64 μg, 65 μg, 66 μg, 67 μg, 68 μg, 69 μg, 70 μg, 71 μg, 72 μg, 73 μg, 74 μg, 75 μg, 76 μg, 77 μg, 78 μg, 79 μg, 80 μg, 81 μg, 82 μg, 83 μg, 84 μg, 85 μg, 86 μg, 87 μg, 88 μg, 89 μg, 90 μg, 91 μg, 92 μg, 93 μg, 94 μg, 95 μg, 96 μg, 97 μg, 98 μg, 99 μg, 100 μg, 101 μg, 102 μg, 103 μg, 104 μg, 105 μg, 106 μg, 107 μg, 108 μg, 109 μg, 110 μg, 111 μg, 112 μg, 113 μg, 114 μg, 115 μg, 116 μg, 117 μg, 118 μg, 119 μg, or 120 μg; from 58 μg to: 59 μg, 60 μg, 61 μg, 62 μg, 63 μg, 64 μg, 65 μg, 66 μg, 67 μg, 68 μg, 69 μg, 70 μg, 71 μg, 72 μg, 73 μg, 74 μg, 75 μg, 76 μg, 77 μg, 78 μg, 79 μg, 80 μg, 81 μg, 82 μg, 83 μg, 84 μg, 85 μg, 86 μg, 87 μg, 88 μg, 89 μg, 90 μg, 91 μg, 92 μg, 93 μg, 94 μg, 95 μg, 96 μg, 97 μg, 98 μg, 99 μg, 100 μg, 101 μg, 102 μg, 103 μg, 104 μg, 105 μg, 106 μg, 107 μg, 108 μg, 109 μg, 110 μg, 111 μg, 112 μg, 113 μg, 114 μg, 115 μg, 116 μg, 117 μg, 118 μg, 119 μg, or 120 μg; from 59 μg to:60 μg, 61 μg, 62 μg, 63 μg, 64 μg, 65 μg, 66 μg, 67 μg, 68 μg, 69 μg, 70 μg, 71 μg, 72 μg, 73 μg, 74 μg, 75 μg, 76 μg, 77 μg, 78 μg, 79 μg, 80 μg, 81 μg, 82 μg, 83 μg, 84 μg, 85 μg, 86 μg, 87 μg, 88 μg, 89 μg, 90 μg, 91 μg, 92 μg, 93 μg, 94 μg, 95 μg, 96 μg, 97 μg, 98 μg, 99 μg, 100 μg, 101 μg, 102 μg, 103 μg, 104 μg, 105 μg, 106 μg, 107 μg, 108 μg, 109 μg, 110 μg, 111 μg, 112 μg, 113 μg, 114 μg, 115 μg, 116 μg, 117 μg, 118 μg, 119 μg, or 120 μg; from 60 μg to: 61 μg, 62 μg, 63 μg, 64 μg, 65 μg, 66 μg, 67 μg, 68 μg, 69 μg, 70 μg, 71 μg, 72 μg, 73 μg, 74 μg, 75 μg, 76 μg, 77 μg, 78 μg, 79 μg, 80 μg, 81 μg, 82 μg, 83 μg, 84 μg, 85 μg, 86 μg, 87 μg, 88 μg, 89 μg, 90 μg, 91 μg, 92 μg, 93 μg, 94 μg, 95 μg, 96 μg, 97 μg, 98 μg, 99 μg, 100 μg, 101 μg, 102 μg, 103 μg, 104 μg, 105 μg, 106 μg, 107 μg, 108 μg, 109 μg, 110 μg, 111 μg, 112 μg, 113 μg, 114 μg, 115 μg, 116 μg, 117 μg, 118 μg, 119 μg, or 120 μg; from 61 μg to: 62 μg, 63 μg, 64 μg, 65 μg, 66 μg, 67 μg, 68 μg, 69 μg, 70 μg, 71 μg, 72 μg, 73 μg, 74 μg, 75 μg, 76 μg, 77 μg, 78 μg, 79 μg, 80 μg, 81 μg, 82 μg, 83 μg, 84 μg, 85 μg, 86 μg, 87 μg, 88 μg, 89 μg, 90 μg, 91 μg, 92 μg, 93 μg, 94 μg, 95 μg, 96 μg, 97 μg, 98 μg, 99 μg, 100 μg, 101 μg, 102 μg, 103 μg, 104 μg, 105 μg, 106 μg, 107 μg, 108 μg, 109 μg, 110 μg, 111 μg, 112 μg, 113 μg, 114 μg, 115 μg, 116 μg, 117 μg, 118 μg, 119 μg, or 120 μg; from 62 μg to: 63 μg, 64 μg, 65 μg, 66 μg, 67 μg, 68 μg, 69 μg, 70 μg, 71 μg, 72 μg, 73 μg, 74 μg, 75 μg, 76 μg, 77 μg, 78 μg, 79 μg, 80 μg, 81 μg, 82 μg, 83 μg, 84 μg, 85 μg, 86 μg, 87 μg, 88 μg, 89 μg, 90 μg, 91 μg, 92 μg, 93 μg, 94 μg, 95 μg, 96 μg, 97 μg, 98 μg, 99 μg, 100 μg, 101 μg, 102 μg, 103 μg, 104 μg, 105 μg, 106 μg, 107 μg, 108 μg, 109 μg, 110 μg, 111 μg, 112 μg, 113 μg, 114 μg, 115 μg, 116 μg, 117 μg, 118 μg, 119 μg, or 120 μg; from 63 μg to: 64 μg, 65 μg, 66 μg, 67 μg, 68 μg, 69 μg, 70 μg, 71 μg, 72 μg, 73 μg, 74 μg, 75 μg, 76 μg, 77 μg, 78 μg, 79 μg, 80 μg, 81 μg, 82 μg, 83 μg, 84 μg, 85 μg, 86 μg, 87 μg, 88 μg, 89 μg, 90 μg, 91 μg, 92 μg, 93 μg, 94 μg, 95 μg, 96 μg, 97 μg, 98 μg, 99 μg, 100 μg, 101 μg, 102 μg, 103 μg, 104 μg, 105 μg, 106 μg, 107 μg, 108 μg, 109 μg, 110 μg, 111 μg, 112 μg, 113 μg, 114 μg, 115 μg, 116 μg, 117 μg, 118 μg, 119 μg, or 120 μg; from 64 μg to: 65 μg, 66 μg, 67 μg, 68 μg, 69 μg, 70 μg, 71 μg, 72 μg, 73 μg, 74 μg, 75 μg, 76 μg, 77 μg, 78 μg, 79 μg, 80 μg, 81 μg, 82 μg, 83 μg, 84 μg, 85 μg, 86 μg, 87 μg, 88 μg, 89 μg, 90 μg, 91 μg, 92 μg, 93 μg, 94 μg, 95 μg, 96 μg, 97 μg, 98 μg, 99 μg, 100 μg, 101 μg, 102 μg, 103 μg, 104 μg, 105 μg, 106 μg, 107 μg, 108 μg, 109 μg, 110 μg, 111 μg, 112 μg, 113 μg, 114 μg, 115 μg, 116 μg, 117 μg, 118 μg, 119 μg, or 120 μg; from 65 μg to: 66 μg, 67 μg, 68 μg, 69 μg, 70 μg, 71 μg, 72 μg, 73 μg, 74 μg, 75 μg, 76 μg, 77 μg, 78 μg, 79 μg, 80 μg, 81 μg, 82 μg, 83 μg, 84 μg, 85 μg, 86 μg, 87 μg, 88 μg, 89 μg, 90 μg, 91 μg, 92 μg, 93 μg, 94 μg, 95 μg, 96 μg, 97 μg, 98 μg, 99 μg, 100 μg, 101 μg, 102 μg, 103 μg, 104 μg, 105 μg, 106 μg, 107 μg, 108 μg, 109 μg, 110 μg, 111 μg, 112 μg, 113 μg, 114 μg, 115 μg, 116 μg, 117 μg, 118 μg, 119 μg, or 120 μg; from 66 μg to: 67 μg, 68 μg, 69 μg, 70 μg, 71 μg, 72 μg, 73 μg, 74 μg, 75 μg, 76 μg, 77 μg, 78 μg, 79 μg, 80 μg, 81 μg, 82 μg, 83 μg, 84 μg, 85 μg, 86 μg, 87 μg, 88 μg, 89 μg, 90 μg, 91 μg, 92 μg, 93 μg, 94 μg, 95 μg, 96 μg, 97 μg, 98 μg, 99 μg, 100 μg, 101 μg, 102 μg, 103 μg, 104 μg, 105 μg, 106 μg, 107 μg, 108 μg, 109 μg, 110 μg, 111 μg, 112 μg, 113 μg, 114 μg, 115 μg, 116 μg, 117 μg, 118 μg, 119 μg, or 120 μg; from 67 μg to: 68 μg, 69 μg, 70 μg, 71 μg, 72 μg, 73 μg, 74 μg, 75 μg, 76 μg, 77 μg, 78 μg, 79 μg, 80 μg, 81 μg, 82 μg, 83 μg, 84 μg, 85 μg, 86 μg, 87 μg, 88 μg, 89 μg, 90 μg, 91 μg, 92 μg, 93 μg, 94 μg, 95 μg, 96 μg, 97 μg, 98 μg, 99 μg, 100 μg, 101 μg, 102 μg, 103 μg, 104 μg, 105 μg, 106 μg, 107 μg, 108 μg, 109 μg, 110 μg, 111 μg, 112 μg, 113 μg, 114 μg, 115 μg, 116 μg, 117 μg, 118 μg, 119 μg, or 120 μg; from 68 μg to: 69 μg 70 μg, 71 μg, 72 μg, 73 μg, 74 μg, 75 μg, 76 μg, 77 μg, 78 μg, 79 μg, 80 μg, 81 μg, 82 μg, 83 μg, 84 μg, 85 μg, 86 μg, 87 μg, 88 μg, 89 μg, 90 μg, 91 μg, 92 μg, 93 μg, 94 μg, 95 μg, 96 μg, 97 μg, 98 μg, 99 μg, 100 μg, 101 μg, 102 μg, 103 μg, 104 μg, 105 μg, 106 μg, 107 μg, 108 μg, 109 μg, 110 μg, 111 μg, 112 μg, 113 μg, 114 μg, 115 μg, 116 μg, 117 μg, 118 μg, 119 μg, or 120 μg; from 69 μg to: 70 μg, 71 μg, 72 μg, 73 μg, 74 μg, 75 μg, 76 μg, 77 μg, 78 μg, 79 μg, 80 μg, 81 μg, 82 μg, 83 μg, 84 μg, 85 μg, 86 μg, 87 μg, 88 μg, 89 μg, 90 μg, 91 μg, 92 μg, 93 μg, 94 μg, 95 μg, 96 μg, 97 μg, 98 μg, 99 μg, 100 μg, 101 μg, 102 μg, 103 μg, 104 μg, 105 μg, 106 μg, 107 μg, 108 μg, 109 μg, 110 μg, 111 μg, 112 μg, 113 μg, 114 μg, 115 μg, 116 μg, 117 μg, 118 μg, 119 μg, or 120 μg; from 70 μg to: 71 μg, 72 μg, 73 μg, 74 μg, 75 μg, 76 μg, 77 μg, 78 μg, 79 μg, 80 μg, 81 μg, 82 μg, 83 μg, 84 μg, 85 μg, 86 μg, 87 μg, 88 μg, 89 μg, 90 μg, 91 μg, 92 μg, 93 μg, 94 μg, 95 μg, 96 μg, 97 μg, 98 μg, 99 μg, 100 μg, 101 μg, 102 μg, 103 μg, 104 μg, 105 μg, 106 μg, 107 μg, 108 μg, 109 μg, 110 μg, 111 μg, 112 μg, 113 μg, 114 μg, 115 μg, 116 μg, 117 μg, 118 μg, 119 μg, or 120 μg; from 71 μg to: 72 μg, 73 μg, 74 μg, 75 μg, 76 μg, 77 μg, 78 μg, 79 μg, 80 μg, 81 μg, 82 μg, 83 μg, 84 μg, 85 μg, 86 μg, 87 μg, 88 μg, 89 μg, 90 μg, 91 μg, 92 μg, 93 μg, 94 μg, 95 μg, 96 μg, 97 μg, 98 μg, 99 μg, 100 μg, 101 μg, 102 μg, 103 μg, 104 μg, 105 μg, 106 μg, 107 μg, 108 μg, 109 μg, 110 μg, 111 μg, 112 μg, 113 μg, 114 μg, 115 μg, 116 μg, 117 μg, 118 μg, 119 μg, or 120 μg; from 72 μg to: 73 μg, 74 μg, 75 μg, 76 μg, 77 μg, 78 μg, 79 μg, 80 μg, 81 μg, 82 μg, 83 μg, 84 μg, 85 μg, 86 μg, 87 μg, 88 μg, 89 μg, 90 μg, 91 μg, 92 μg, 93 μg, 94 μg, 95 μg, 96 μg, 97 μg, 98 μg, 99 μg, 100 μg, 101 μg, 102 μg, 103 μg, 104 μg, 105 μg, 106 μg, 107 μg, 108 μg, 109 μg, 110 μg, 111 μg, 112 μg, 113 μg, 114 μg, 115 μg, 116 μg, 117 μg, 118 μg, 119 μg, or 120 μg; from 73 μg to: 74 μg, 75 μg, 76 μg, 77 μg, 78 μg, 79 μg, 80 μg, 81 μg, 82 μg, 83 μg, 84 μg, 85 μg, 86 μg, 87 μg, 88 μg, 89 μg, 90 μg, 91 μg, 92 μg, 93 μg, 94 μg, 95 μg, 96 μg, 97 μg, 98 μg, 99 μg, 100 μg, 101 μg, 102 μg, 103 μg, 104 μg, 105 μg, 106 μg, 107 μg, 108 μg, 109 μg, 110 μg, 111 μg, 112 μg, 113 μg, 114 μg, 115 μg, 116 μg, 117 μg, 118 μg, 119 μg, or 120 μg; from 74 μg to: 75 μg, 76 μg, 77 μg, 78 μg, 79 μg, 80 μg, 81 μg, 82 μg, 83 μg, 84 μg, 85 μg, 86 μg, 87 μg, 88 μg, 89 μg, 90 μg, 91 μg, 92 μg, 93 μg, 94 μg, 95 μg, 96 μg, 97 μg, 98 μg, 99 μg, 100 μg, 101 μg, 102 μg, 103 μg, 104 μg, 105 μg, 106 μg, 107 μg, 108 μg, 109 μg, 110 μg, 111 μg, 112 μg, 113 μg, 114 μg, 115 μg, 116 μg, 117 μg, 118 μg, 119 μg, or 120 μg; from 75 μg to: 76 μg, 77 μg, 78 μg, 79 μg, 80 μg, 81 μg, 82 μg, 83 μg, 84 μg, 85 μg, 86 μg, 87 μg, 88 μg, 89 μg, 90 μg, 91 μg, 92 μg, 93 μg, 94 μg, 95 μg, 96 μg, 97 μg, 98 μg, 99 μg, 100 μg, 101 μg, 102 μg, 103 μg, 104 μg, 105 μg, 106 μg, 107 μg, 108 μg, 109 μg, 110 μg, 111 μg, 112 μg, 113 μg, 114 μg, 115 μg, 116 μg, 117 μg, 118 μg, 119 μg, or 120 μg; from 76 μg to: 77 μg, 78 μg, 79 μg, 80 μg, 81 μg, 82 μg, 83 μg, 84 μg, 85 μg, 86 μg, 87 μg, 88 μg, 89 μg, 90 μg, 91 μg, 92 μg, 93 μg, 94 μg, 95 μg, 96 μg, 97 μg, 98 μg, 99 μg, 100 μg, 101 μg, 102 μg, 103 μg, 104 μg, 105 μg, 106 μg, 107 μg, 108 μg, 109 μg, 110 μg, 111 μg, 112 μg, 113 μg, 114 μg, 115 μg, 116 μg, 117 μg, 118 μg, 119 μg, or 120 μg; from 77 μg to: 78 μg, 79 μg, 80 μg, 81 μg, 82 μg, 83 μg, 84 μg, 85 μg, 86 μg, 87 μg, 88 μg, 89 μg, 90 μg, 91 μg, 92 μg, 93 μg, 94 μg, 95 μg, 96 μg, 97 μg, 98 μg, 99 μg, 100 μg, 101 μg, 102 μg, 103 μg, 104 μg, 105 μg, 106 μg, 107 μg, 108 μg, 109 μg, 110 μg, 111 μg, 112 μg, 113 μg, 114 μg, 115 μg, 116 μg, 117 μg, 118 μg, 119 μg, or 120 μg; from 78 μg to: 79 μg, 80 μg, 81 μg, 82 μg, 83 μg, 84 μg, 85 μg, 86 μg, 87 μg, 88 μg, 89 μg, 90 μg, 91 μg, 92 μg, 93 μg, 94 μg, 95 μg, 96 μg, 97 μg, 98 μg, 99 μg, 100 μg, 101 μg, 102 μg, 103 μg, 104 μg, 105 μg, 106 μg, 107 μg, 108 μg, 109 μg, 110 μg, 111 μg, 112 μg, 113 μg, 114 μg, 115 μg, 116 μg, 117 μg, 118 μg, 119 μg, or 120 μg; from 79 μg to: 80 μg, 81 μg, 82 μg, 83 μg, 84 μg, 85 μg, 86 μg, 87 μg, 88 μg, 89 μg, 90 μg, 91 μg, 92 μg, 93 μg, 94 μg, 95 μg, 96 μg, 97 μg, 98 μg, 99 μg, 100 μg, 101 μg, 102 μg, 103 μg, 104 μg, 105 μg, 106 μg, 107 μg, 108 μg, 109 μg, 110 μg, 111 μg, 112 μg, 113 μg, 114 μg, 115 μg, 116 μg, 117 μg, 118 μg, 119 μg, or 120 μg; from 80 μg to: 81 μg, 82 μg, 83 μg, 84 μg, 85 μg, 86 μg, 87 μg, 88 μg, 89 μg, 90 μg, 91 μg, 92 μg, 93 μg, 94 μg, 95 μg, 96 μg, 97 μg, 98 μg, 99 μg, 100 μg, 101 μg, 102 μg, 103 μg, 104 μg, 105 μg, 106 μg, 107 μg, 108 μg, 109 μg, 110 μg, 111 μg, 112 μg, 113 μg, 114 μg, 115 μg, 116 μg, 117 μg, 118 μg, 119 μg, or 120 μg of recombinant RNA molecules.

[0508] Also contemplated and supported are combinations of unit doses of “at least” and any of the above-noted unit doses of “no more than” with the unit doses provided in an Example of this document. Also contemplated and supported are combinations of the unit doses of the Example section of this document to provide a range (i.e. the unit dose from [the unit dose from example X₁] to [the unit dose from example X₂] wherein X₁ and X₂ represent any two exemplary treatments of the Examples.

### Uses to Form Medicaments Comprising the Recombinant RNA

[0509] In one aspect, a use of the recombinant RNA molecules for the manufacture of a medicament for delivering the segment that encodes the heterologous polypeptide is provided; the use comprising admixing the recombinant RNA molecules with the lipids of the lipid nanoparticle (LNP), thereby obtaining the formulation, including the formulation described above.

[0510] In another aspect, a use of the formulation for the manufacture of a medicament for delivering the segment that encodes the heterologous polypeptide is provided; the use comprising admixing the formulation comprising the recombinant RNA molecules and optionally the LNPs, including formulation, the recombinant RNA molecule, and the LNPs described above, with a pharmaceutically acceptable vehicle. In some embodiments, the pharmaceutically acceptable vehicle is a buffer or saline. In some embodiments, the buffer is phosphate buffered saline.

[0511] In another aspect, a use of the formulation for the manufacture of a medicament for delivering the segment that encodes the heterologous polypeptide is provided; the use comprising admixing the formulation, including the formulation described above, with LNPs that do not comprise RNA, LNPs that comprise RNA that does not comprise the segment that encodes the heterologous polypeptide, or LNPs that comprise recombinant RNA that comprises a segment that encodes a second heterologous polypeptide.

[0512] In one aspect, a use of the recombinant RNA molecules for the manufacture of a medicament for preventing a disease caused by a pathogen is provided; the pathogen comprising the immunogen; the use comprising admixing the recombinant RNA molecules with the lipids of the lipid nanoparticle (LNP), thereby obtaining the formulations described above. In some embodiments, the segment that encodes a heterologous polypeptide comprises a segment that encodes the immunogen or an antibody that is against the immunogen.

[0513] In one aspect, a use of the recombinant RNA molecules for the manufacture of a medicament for treating a disease caused by a pathogen is provided; the pathogen comprising the immunogen; the use comprising admixing the recombinant RNA molecules with the lipids of the lipid nanoparticle (LNP), thereby obtaining the formulations described above. In some embodiments, the segment that encodes a heterologous polypeptide comprises a segment that encodes the immunogen or an antibody that is against the immunogen.

[0514] In another aspect, a use of the formulation for the manufacture of a medicament for preventing a disease caused by a pathogen is provided; the pathogen comprising the immunogen; the use comprising admixing the formulation, including the formulation described above, with a pharmaceutically acceptable vehicle. In some embodiments, the pharmaceutically acceptable vehicle is a buffer or saline. In some embodiments, the buffer is phosphate buffered saline.

[0515] In another aspect, a use of the formulation for the manufacture of a medicament for treating a disease caused by a pathogen is provided; the pathogen comprising the immunogen; the use comprising admixing the formulation, including the formulation described above, with a pharmaceutically acceptable vehicle. In some embodiments, the pharmaceutically acceptable vehicle is a buffer or saline. In some embodiments, the buffer is phosphate buffered saline.

[0516] In another aspect, a use of the formulation for the manufacture of a medicament for preventing a disease caused by a pathogen is provided; the pathogen comprising the immunogen; the use comprising admixing the formulation, including the formulation described above, with LNPs that do not comprise RNA, LNPs that comprise RNA that does not comprise the segment that encodes the heterologous polypeptide, or LNPs that comprise recombinant RNA that comprises a segment that encodes a second heterologous polypeptide. In some embodiments, the segment that encodes a heterologous polypeptide comprises a segment that encodes the immunogen or an antibody that is against the immunogen.

[0517] In another aspect, a use of the formulation for the manufacture of a medicament for treating a disease caused by a pathogen is provided; the pathogen comprising the immunogen; the use comprising admixing the formulation, including the formulation described above, with LNPs that do not comprise RNA, LNPs that comprise RNA that does not comprise the segment that encodes the heterologous polypeptide, or LNPs that comprise recombinant RNA that comprises a segment that encodes a second heterologous polypeptide. In some embodiments, the segment that encodes a heterologous polypeptide comprises a segment that encodes the immunogen or an antibody that is against the immunogen.

### Formulation for Use in Delivering, Eliciting an Immune Response, Preventing an Infection by a Pathogen

[0518] In another aspect, a formulation for use in delivering nucleic acid that encodes a heterologous polypeptide is provided; the formulation comprising the recombinant RNA molecules and the LNP, including the recombinant RNA molecules and the LNPs described above; the recombinant RNA molecules comprising the segment that encodes the heterologous polypeptide. In some embodiments, the subject is a mammal, such as a human or a large veterinary mammal (e.g. horses, cattle, deer, goats, pigs). Where the formulation or recombinant RNA is for eliciting a protective immune response, the subject is preferably a human, such as a child (e.g. a toddler or infant), a teenager, and the recombinant RNA or the formulation comprising the recombinant RNA is formulated as a vaccine. Where the composition or recombinant RNA is used as a treatment or for therapeutic use, the human is preferably a teenager or an adult. A vaccine intended for children may also be administered to adults, with the provisio that the amount of recombinant RNA or formulation comprising the recombinant RNA may be scaled up to provide an effective amount consistent with the state of the immune system of the subject (i.e. the elderly having more difficulty eliciting certain immune responses) and the average body weight of a subject of that age or the actual body weight of the subject.

[0519] In another aspect, a formulation for expressing a heterologous polypeptide is provided; the formulation comprising the recombinant RNA molecules and the LNP, including the recombinant RNA molecules and the LNPs described above; the recombinant RNA molecules comprising the segment that encodes the heterologous polypeptide. In some embodiments, the subject is a mammal, such as a human or a large veterinary mammal (e.g. horses, cattle, deer, goats, pigs). Where the formulation or recombinant RNA is for eliciting a protective immune response, the subject is preferably a human, such as a child (e.g. a toddler or infant), a teenager, and the recombinant RNA or the formulation comprising the recombinant RNA is formulated as a vaccine. Where the composition or recombinant RNA is used as a treatment or for therapeutic use, the human is preferably a teenager or an adult. A vaccine intended for children may also be administered to adults, with the provisio that the amount of recombinant RNA or formulation comprising the recombinant RNA may be scaled up to provide an effective amount consistent with the state of the immune system of the subject (i.e. the elderly having more difficulty eliciting certain immune responses) and the average body weight of a subject of that age or the actual body weight of the subject.

[0520] In another aspect, a formulation for use in preventing infection by a pathogen in a subject is provided; the formulation comprising the recombinant RNA molecules and the LNPs, including the recombinant RNA molecules and the LNPs described above; the segment that encodes a heterologous polypeptide comprising a segment that encodes an immunogen or an antibody against the immunogen; the pathogen comprising the immunogen. In some embodiments, the subject is a mammal, such as a human or a large veterinary mammal (e.g. horses, cattle, deer, goats, pigs). Where the formulation or recombinant RNA is for eliciting a protective immune response, the subject is preferably a human, such as a child (e.g. a toddler or infant), a teenager, and the recombinant RNA or the formulation comprising the recombinant RNA is formulated as a vaccine. Where the composition or recombinant RNA is used as a treatment or for therapeutic use, the human is preferably a teenager or an adult. A vaccine intended for children may also be administered to adults, with the provisio that the amount of recombinant RNA or formulation comprising the recombinant RNA may be scaled up to provide an effective amount consistent with the state of the immune system of the subject (i.e. the elderly having more difficulty eliciting certain immune responses) and the average body weight of a subject of that age or the actual body weight of the subject.

[0521] In another aspect, a formulation for use in eliciting an immune response in a subject is provided; the formulation comprising the recombinant RNA molecules and the LNPs, including the recombinant RNA molecules and the LNPs described above; the segment that encodes a heterologous polypeptide comprising a segment that encodes an immunogen or an antibody against the immunogen. In some embodiments, the subject is a mammal, such as a human or a large veterinary mammal (e.g. horses, cattle, deer, goats, pigs). Where the formulation or recombinant RNA is for eliciting a protective immune response, the subject is preferably a human, such as a child (e.g. a toddler or infant), a teenager, and the recombinant RNA or the formulation comprising the recombinant RNA is formulated as a vaccine. Where the composition or recombinant RNA is used as a treatment or for therapeutic use, the human is preferably a teenager or an adult. A vaccine intended for children may also be administered to adults, and it is contemplated and supported that the amount of recombinant RNA or formulation comprising the recombinant RNA may be scaled up to provide an effective amount consistent with the state of the immune system of the subject (i.e. the elderly having more difficulty eliciting certain immune responses) and the average body weight of a subject of that age or the actual body weight of the subject.

### CLAUSES

[0522] The aspects and embodiments of the invention are further illustrated by reference to the following clauses:
[0523] Clause 1 A recombinant ribonucleic acid (RNA) molecule comprising an optional 5′ cap nucleoside (i.e. a 7-methylguanosine or a modified 7-methylguanosine), an optional linker, an optional first 5′ ribonucleoside, a 5′ untranslated region (5′ UTR), a segment that encodes a heterologous polypeptide, a 3′ untranslated region (3′ UTR), and an optional 3′ poly(adenosine monophosphate) (poly(A)) tail; wherein:
   [0524] (a) the 5′ UTR is 5′ of the segment that encodes the heterologous polypeptide;
   [0525] (b) the 3′ UTR is 3′ of the segment that encodes the heterologous polypeptide;
   [0526] (c) the optional 3′ poly(A) is 3′ of the 3′ UTR; and
   [0527] (d) (i) the 5′ UTR comprises a sequence that has at least 70% sequence identity to SEQ ID NO: 1, SEQ ID NO: 3, SEQ ID NO: 5, SEQ ID NO: 7, SEQ ID NO: 9, SEQ ID NO: 11, or SEQ ID NO: 13; or
   [0528] (ii) the 3′ UTR comprises a sequence that has at least 70% sequence identity to SEQ ID NO: 2, SEQ ID NO: 4, SEQ ID NO: 6, SEQ ID NO: 8, SEQ ID NO: 10, SEQ ID NO: 12, or SEQ ID NO: 14.
[0529] Clause 2 The RNA molecule according to clause 1, wherein the 5′ UTR comprises a sequence that has at least 70% sequence identity to SEQ ID NO: 1, SEQ ID NO: 3, SEQ ID NO: 5, SEQ ID NO: 7, SEQ ID NO: 9, SEQ ID NO: 11, or SEQ ID NO: 13.
[0530] Clause 3 The RNA molecule according to clause 1, wherein the 3′ UTR comprises a sequence that has at least 70% sequence identity to SEQ ID NO: 2, SEQ ID NO: 4, SEQ ID NO: 6, SEQ ID NO: 8, SEQ ID NO: 10, SEQ ID NO: 12, or SEQ ID NO: 14.
[0531] Clause 4 The RNA molecule according to clause 1, wherein the 5′ UTR comprises a sequence that has at least 70% sequence identity to SEQ ID NO: 1, SEQ ID NO: 3, SEQ ID NO: 5, SEQ ID NO: 7, SEQ ID NO: 9, SEQ ID NO: 11, or SEQ ID NO: 13; and the 3′ UTR comprises a sequence that has at least 70% sequence identity to SEQ ID NO: 2, SEQ ID NO: 4, SEQ ID NO: 6, SEQ ID NO: 8, SEQ ID NO: 10, SEQ ID NO: 12, or SEQ ID NO: 14.
[0532] Clause 5 The RNA molecule according to any one of clauses 1 to 4, wherein the 5′ UTR comprises a sequence that has at least 70% sequence identity to SEQ ID NO: 1.
[0533] Clause 6 The RNA molecule according to any one of clauses 1 to 4, wherein the 5′ UTR consists of a sequence that has at least 70% sequence identity to SEQ ID NO: 1.
[0534] Clause 7 The RNA molecule according to any one of clauses 1 to 4, wherein the 5′ UTR comprises a sequence that has at least 70% sequence identity to SEQ ID NO: 3.
[0535] Clause 8 The RNA molecule according to any one of clauses 1 to 4, wherein the 5′ UTR consists of a sequence that has at least 70% sequence identity to SEQ ID NO: 3.
[0536] Clause 9 The RNA molecule according to any one of clauses 1 to 4, wherein the 5′ UTR comprises a sequence that has at least 70% sequence identity to SEQ ID NO: 5.
[0537] Clause 10 The RNA molecule according to any one of clauses 1 to 4, wherein the 5′ UTR consists of a sequence that has at least 70% sequence identity to SEQ ID NO: 5.
[0538] Clause 11 The RNA molecule according to any one of clauses 1 to 4, wherein the 5′ UTR comprises a sequence that has at least 70% sequence identity to SEQ ID NO: 7.
[0539] Clause 12 The RNA molecule according to any one of clauses 1 to 4, wherein the 5′ UTR consists of a sequence that has at least 70% sequence identity to SEQ ID NO: 7.
[0540] Clause 13 The RNA molecule according to any one of clauses 1 to 4, wherein the 5′ UTR comprises a sequence that has at least 70% sequence identity to SEQ ID NO: 9.
[0541] Clause 14 The RNA molecule according to any one of clauses 1 to 4, wherein the 5′ UTR consists of a sequence that has at least 70% sequence identity to SEQ ID NO: 9.
[0542] Clause 15 The RNA molecule according to any one of clauses 1 to 4, wherein the 5′ UTR comprises a sequence that has at least 70% sequence identity to SEQ ID NO: 11.
[0543] Clause 16 The RNA molecule according to any one of clauses 1 to 4, wherein the 5′ UTR consists of a sequence that has at least 70% sequence identity to SEQ ID NO: 11.
[0544] Clause 17 The RNA molecule according to any one of clauses 1 to 4, wherein the 5′ UTR comprises a sequence that has at least 70% sequence identity to SEQ ID NO: 13.
[0545] Clause 18 The RNA molecule according to any one of clauses 1 to 4, wherein the 5′ UTR consists of a sequence that has at least 70% sequence identity to SEQ ID NO: 13.
[0546] Clause 19 The RNA molecule according to any one of clauses 1 to 18, wherein the 3′ UTR comprises a sequence that has at least 70% sequence identity to SEQ ID NO: 2.
[0547] Clause 20 The RNA molecule according to any one of clauses 1 to 18, wherein the 3′ UTR consists of a sequence that has at least 70% sequence identity to SEQ ID NO: 2.
[0548] Clause 21 The RNA molecule according to any one of clauses 1 to 18, wherein the 3′ UTR comprises a sequence that has at least 70% sequence identity to SEQ ID NO: 4.
[0549] Clause 22 The RNA molecule according to any one of clauses 1 to 18, wherein the 3′ UTR consists of a sequence that has at least 70% sequence identity to SEQ ID NO: 4.
[0550] Clause 23 The RNA molecule according to any one of clauses 1 to 18, wherein the 3′ UTR comprises a sequence that has at least 70% sequence identity to SEQ ID NO: 6.
[0551] Clause 24 The RNA molecule according to any one of clauses 1 to 18, wherein the 3′ UTR consists of a sequence that has at least 70% sequence identity to SEQ ID NO: 6.
[0552] Clause 25 The RNA molecule according to any one of clauses 1 to 18, wherein the 3′ UTR comprises a sequence that has at least 70% sequence identity to SEQ ID NO: 8.
[0553] Clause 26 The RNA molecule according to any one of clauses 1 to 18, wherein the 3′ UTR consists of a sequence that has at least 70% sequence identity to SEQ ID NO: 8.
[0554] Clause 27 The RNA molecule according to any one of clauses 1 to 18, wherein the 3′ UTR comprises a sequence that has at least 70% sequence identity to SEQ ID NO: 10.
[0555] Clause 28 The RNA molecule according to any one of clauses 1 to 18, wherein the 3′ UTR consists of a sequence that has at least 70% sequence identity to SEQ ID NO: 10.
[0556] Clause 29 The RNA molecule according to any one of clauses 1 to 18, wherein the 3′ UTR comprises a sequence that has at least 70% sequence identity to SEQ ID NO: 12.
[0557] Clause 30 The RNA molecule according to any one of clauses 1 to 18, wherein the 3′ UTR consists of a sequence that has at least 70% sequence identity to SEQ ID NO: 12.
[0558] Clause 31 The RNA molecule according to any one of clauses 1 to 18, wherein the 3′ UTR comprises a sequence that has at least 70% sequence identity to SEQ ID NO: 14.
[0559] Clause 32 The RNA molecule according to any one of clauses 1 to 18, wherein the 3′ UTR consists of a sequence that has at least 70% sequence identity to SEQ ID NO: 14.
[0560] Clause 33 The RNA molecule according to any one of clauses 1 to 32, wherein the 5′ UTR comprises a sequence that has at least 80% sequence identity to the reference sequence.
[0561] Clause 34 The RNA molecule according to clause 33, wherein the 5′ UTR comprises a sequence that has at least 90% sequence identity to the reference sequence.
[0562] Clause 35 The RNA molecule according to clause 34, wherein the 5′ UTR comprises a sequence that has at least 95% sequence identity to the reference sequence.
[0563] Clause 36 The RNA molecule according to clause 35, wherein the 5′ UTR comprises a sequence that has at least 98% sequence identity to the reference sequence.
[0564] Clause 37 The RNA molecule according to clause 36, wherein the 5′ UTR comprises a sequence that has at least 99% sequence identity to the reference sequence.
[0565] Clause 38 The RNA molecule according to clause 37, wherein the 5′ UTR comprises a sequence that has 100% sequence identity to the reference sequence.
[0566] Clause 39 The RNA molecule according to any one of clauses 1 to 38, wherein the 3′ UTR has at least 80% sequence identity.
[0567] Clause 40 The RNA molecule according to clause 39, wherein the 3′ UTR comprises a sequence that has at least 90% sequence identity to the reference sequence.
[0568] Clause 41 The RNA molecule according to clause 40, wherein the 3′ UTR comprises a sequence that has at least 95% sequence identity to the reference sequence.
[0569] Clause 42 The RNA molecule according to clause 41, wherein the 3′ UTR comprises a sequence that has at least 98% sequence identity to the reference sequence.
[0570] Clause 43 The RNA molecule according to clause 42, wherein the 3′ UTR comprises a sequence that has at least 99% sequence identity to the reference sequence.
[0571] Clause 44 The RNA molecule according to clause 43, wherein the 3′ UTR comprises a sequence that has 100% sequence identity to the reference sequence.
[0572] Clause 45 The RNA molecule according to clause 1, wherein the 5′ UTR comprises a sequence that has at least 95% identity to SEQ ID NO: 5 and the 3′ UTR comprises a sequence that has at least 95% identity to SEQ ID NO: 6.
[0573] Clause 45 The RNA molecule according to clause 1, wherein the 5′ UTR comprises a sequence that has at least 95% identity to SEQ ID NO: 7 and the 3′ UTR comprises a sequence that has at least 95% identity to SEQ ID NO: 8.
[0574] Clause 45 The RNA molecule according to clause 1, wherein the 5′ UTR comprises a sequence that has at least 95% identity to SEQ ID NO: 13 and the 3′ UTR a sequence that has at least 95% identity to SEQ ID NO: 14.
[0575] Clause 46 The RNA molecule according to any one of clauses 1 to 45, wherein the heterologous polypeptide comprises an immunogen.
[0576] Clause 47 The RNA molecule according to clause 46, wherein the heterologous polypeptide consists of an immunogen.
[0577] Clause 48 The RNA molecule according to any one of clauses 1 to 47, wherein the heterologous polypeptide comprises an antibody against an immunogen.
[0578] Clause 49 The RNA molecule according to clause 48, wherein the heterologous polypeptide consists of an antibody against an immunogen.
[0579] Clause 50 The RNA molecule according to any one of clauses 1 to 49, wherein the immunogen elicits an immune response against a bacterium.
[0580] Clause 51 The RNA molecule according to any one of clauses 1 to 50, wherein the immunogen is derived from a bacterium.
[0581] Clause 52 The RNA molecule according to either clause 51 or 52, wherein the bacterium is selected from: Neisseria meningitidis including, but are not limited to, membrane proteins such as adhesins, autotransporters, toxins, iron acquisition proteins, and factor H binding protein; Streptococcus pneumoniae including, but are not limited to, the RrgB pilus subunit, the beta-N-acetyl-hexosaminidase precursor (spr0057), spr0096, general stress protein GSP-781 (spr2021, SP2216), serine/threonine kinase StkP (SP1732), and pneumococcal surface adhesin PsaA; Streptococcus pyogenes; Moraxella catarrhalis; Bordetella pertussis including but are not limited to, pertussis toxin or toxoid (PT), filamentous haemagglutinin (FHA), pertactin, and agglutinogens 2 and 3; Staphylococcus aureus including a hemolysin, esxA, esxB, ferrichrome-binding protein (sta006), and the sta011 lipoprotein; Clostridium tetani including tetanus toxoid immunogen; Cornynebacterium diphtheriae including diphtheria toxoid immunogen; Haemophilus influenzae; Pseudomonas aeruginosa; Streptococcus agalactiae; Chlamydia trachomatis including, but are not limited to, PepA, LcrE, ArtJ, DnaK, CT398, OmpH-like, L7/L12, OmcA, AtoS, CT547, Eno, HtrA,and MurG; Chlamydia pneumoniae; Helicobacter pylori; Escherichia coli, including the following pathological subforms enterotoxigenic E. coli (ETEC), enteroaggregative E. coli (EAggEC), diffusely adhering E. coli (DAEC), enteropathogenic E. coli (EPEC), enterohemorrhagic E. coli (EHEC), and extraintestinal pathogenic E. coli (ExPEC), including therein uropathogenic E. coli (UPEC) and meningitis/sepsis-associated E. coli (MNEC); Bacillus anthracis; Yersinia pestis; Staphylococcus epidermis; Clostridium difficile; Clostridium perfringens; Clostridium botulinums; Legionella pneumophila; Coxiella burnetiid; Brucella, including B. abortus, B. canis, B. melitensis, B. neotomae, B. ovis, B. suis, B. pinnipediae; Francisella, including F. novicida, F. philomiragia, F. tularensis. Neisseria gonorrhoeae, including polypeptides of the outer membrane vesicles; Treponema pallidum; Haemophilus ducreyi; Enterococcus faecalis; Enterococcus faecium; Staphylococcus saprophyticus; Yersinia enterocolitica; Mycobacterium tuberculosis; Rickettsia; Listeria monocytogenes; Vibrio cholerae; Salmonella including Salmonella typhii; Borrelia burgdorferi; Porphyromonas gingivalis; and Klebsiella.
[0582] Clause 53 The RNA molecule according to any one of clauses 1 to 49, wherein the immunogen elicits an immune response against a virus.
[0583] Clause 54 The RNA molecule according to any one of clauses 1 to 49 or 53, wherein the immunogen is derived from a virus.
[0584] Clause 55 The RNA molecule according to either clause 53 or 54, wherein the virus is selected from Orthomyxovirus including influenza A, B, or C virus, including from influenza A virus subtypes H1, H2, H3, H4, H5, H6, H7, H8, H9, H10, H11, H12, H13, H14, H15, and H16 and including the immunogens of neuraminidase matrix M2 proteins, and hemagglutinin; Paramyxoviridae viruses including, but are not limited to, those derived from Pneumoviruses including respiratory syncytial virus (RSV), Rubulaviruses including mumps virus, Paramyxoviruses including parainfluenza virus, Metapneumoviruses, Morbilliviruses including measles, including the spike-like proteins immunogens thereof, membrane fusion proteins, (i.e. encoded as proteins by the RNA but becoming glycoproteins once translated by the mammalian cell expressing said protein; e.g. RSV F and RSV pre-F) and attachment proteins (i.e. encoded as proteins by the RNA but becoming glycoproteins once translated by the mammalian cell expressing said protein; e.g. RSV G); Poxviridae: Viral immunogens include, but are not limited to, those derived from Orthopoxvirus such as Variola vera, including but not limited to, Variola major and Variola minor; Picornavirus including Rhinoviruses, Heparnavirus, Cardioviruses, Aphthoviruses, and Enteroviruses including EV71 enterovirus, coxsackie A virus, coxsackie B virus, type 1 poliovirus, type 2 poliovirusand type 3 poliovirus; Bunyavirus including Orthobunyavirus such as California encephalitis virus, a Phlebovirus such as Rift Valley Fever virus, and a Nairovirus such as Crimean-Congo hemorrhagic fever virus; Heparnavirus including hepatitis A virus (HAV); Filovirus including Marburg virus and Ebolavirus including Zaire ebolavirus, Tai Forest ebolavirus (nee Ivory Coast ebolavirus), Sudan ebolavirus, Reston ebolavirus, Bundibugyo ebolavirus, and Bombali ebolavirus; Togavirus including, Alphavirus, Arterivirus, and Rubivirus including Rubivirus rubella, Rubivirus ruteetense, and Rubivirus strelense; Flavivirus including Tick-borne encephalitis (TBE) virus, Dengue virus (e.g. types 1, 2, 3 or 4), Yellow Fever virus, Japanese encephalitis virus, Kyasanur Forest Virus, West Nile encephalitis virus, St. Louis encephalitis virus, Russian spring-summer encephalitis virus, Powassan encephalitis virus, and Zikavirus; Pestivirus including Bovine viral diarrhea (BVDV), Classical swine fever (CSFV), and Border disease (BDV); Hepadnavirus including Hepatitis B virus, such as hepatitis B virus surface antigen (HBsAg); other hepatitis viruses, including hepatitis C virus, delta hepatitis virus, hepatitis E virus, and hepatitis G virus; Rhabdovirus including alpharahabdovirinae, Almendravirus, Alphanemrhavirus, Alphapaprhavirus, Alpharicinrhavirus, Arurhavirus, Barhavirus, Caligrhavirus, Curiovirus, Ephemerovirus, Hapavirus, Ledantevirus, Lostrhavirus, Lyssavirus such as rabies virus, Merhavirus, Mousrhavirus, Ohlsrhavirus, Perhabdovirus, Sawgrhavirus, Sigmavirus, Sprivivirus, Sripuvirus, Sunrhavirus, Tibrovirus, Tupavirus, Vesiculovirus, Zarhavirus, Betarhabdovirinae, Alphanucleorhabdovirus, Betanucleorhabdovirus, Cytorhabdovirus, Dichorhavirus, Gammanucleorhabdovirus, Varicosavirus, Gammarhabdovirinae, Novirhabdovirus, Alphacrustrhavirus, Alphadrosrhavirus, Alphahymrhavirus, Betahymrhavirus, Betanemrhavirus, Betapaprhavirus, Betaricinrhavirus; Caliciviridae including Norwalk virus (Norovirus) and Norwalk-like Viruses, such as Hawaii Virus and Snow Mountain Virus; Coronavirus including alpha-, beta-, gamma-, and delta-coronaviruses, including severe acute respiratory syndrome (SARS) coronavirus, SARS-CoV-2, Middle East respiratory syndrome coronavirus, human coronavirus HKU1, coronavirus avian infectious bronchitis (IBV), Mouse hepatitis virus (MHV), and Porcine transmissible gastroenteritis virus (TGEV), including a spike polypeptide immunogen, nucleoprotein immunogen, membrane protein immunogen, and ORF3a protein immunogen; Retrovirus including Oncovirus, Lentivirus, such as human immunodeficiency virus 1 and 2, and Spumavirus; Reovirus including Orthoreovirus, Rotavirus, Orbivirus, and Coltivirus; Parvovirus including Parvovirus B19; Herpesvirus including a human herpesvirus including Herpes Simplex Viruses (HSV), such as HSV types 1 and 2, Varicella-zoster virus (VZV), Epstein-Barr virus (EBV), Cytomegalovirus (CMV), Human Herpesvirus 6 (HHV6), Human Herpesvirus 7 (HHV7), and Human Herpesvirus 8 (HHV8), including such immunogens as gB, gEv(e.g. VZV gE), gH (e.g. CMV gH), gl, gL (e.g. CMV gL), gO; gM, gN; UL128, UL130, and UL131A (e.g. CMV UL128, UL130, and UL131A); Papovaviruses including Polyomaviruses and Papillomaviruses, including 1, 2, 4, 5, 6, 8, 11, 13, 16, 18, 31, 33, 35, 39, 41, 42, 47, 51, 57, 58, 63, and 65 thereof; and Adenovirus including Adenovirus A such as adenoviruses 12, 18, 31, Adenovirus B such as adenoviruses 3, 7, 11, 14, 16, 21, 34, 35, 50, and 55, Adenovirus C such as adenoviruses 1, 2, 5, 6, and 57, Adenovirus D such as adenoviruses 8,9,10, 13,15,17,19,20,22,23,24, 25, 26, 27, 28, 29, 30, 32, 33, 36, 37, 38, 39, 42, 43, 44, 45, 46, 47, 48, 49, 51, 53, 54, 56, 58, 59, 60, 62, 63, 64, 65, 67, 69, 70, 71, 72, 73, 74, and 75, Adenovirus E such as adenovirus 4, Adenovirus F such as adenoviruses 40 and 41, and Adenovirus G such as adenovirus 52.
[0585] Clause 56 The RNA molecule according to any one of clauses 1 to 49, wherein the immunogen elicits an immune response against a fungi.
[0586] Clause 57 The RNA molecule according to any one of clauses 1 to 49 or 56, wherein the immunogen is derived from a fungi.
[0587] Clause 58 The RNA molecule according to either clause 56 or 57, wherein the fungi is selected from Dermatophytres, Epidermophyton floccusum, Microsporum audouini, Microsporum canis, Microsporum distortum, Microsporum equinum, Microsporum gypsum, Microsporum nanum, Trichophyton concentricum, Trichophyton equinum, Trichophyton gallinae, Trichophyton gypseum, Trichophyton megnini, Trichophyton mentagrophytes, Trichophyton quinckeanum, Trichophyton rubrum, Trichophyton schoenleini, Trichophyton tonsurans, Trichophyton verrucosum, T. verrucosum var. album, var. discoides, var. ochraceum, Trichophyton violaceum, and/or Trichophyton faviforme; Aspergillus fumigatus, Aspergillus flavus, Aspergillus niger, Aspergillus nidulans, Aspergillus terreus, Aspergillus sydowii, Aspergillus flavatus, Aspergillus glaucus, Blastoschizomyces capitatus, Candida albicans, Candida enolase, Candida tropicalis, Candida glabrata, Candida krusei, Candida parapsilosis, Candida stellatoidea, Candida kusei, Candida parakwsei, Candida lusitaniae, Candida pseudotropicalis, Candida guilliermondi, Cladosporium carrionii, Coccidioides immitis, Blastomyces dermatidis, Cryptococcus neoformans, Geotrichum clavatum, Histoplasma capsulatum, Klebsiella pneumoniae, Microsporidia, Encephalitozoon spp., Septata intestinalis; Enterocytozoon bieneusi; Brachiola spp, Microsporidium spp., Nosema spp., Pleistophora spp., Trachipleistophora spp., Vittaforma spp Paracoccidioides brasiliensis, Pneumocystis carinii, Pythiumn insidiosum, Pityrosporum ovale, Sacharomyces cerevisae, Saccharomyces boulardii, Saccharomyces pombe, Scedosporium apiosperum, Sporothrix schenckii, Trichosporon beigelii, Toxoplasma gondii, Penicillium marneffei, Malassezia spp., Fonsecaea spp., Wangiella spp., Sporothrix spp., Basidiobolus spp., Conidiobolus spp., Rhizopus spp, Mucor spp, Absidia spp, Mortierella spp, Cunninghamella spp, Saksenaea spp., Alternaria spp, Curvularia spp, Helminthosporium spp, Fusarium spp, Aspergillus spp, Penicillium spp, Monolinia spp, Rhizoctonia spp, Paecilomyces spp, Pithomyces spp, and Cladosporium spp.
[0588] Clause 59 The RNA molecule according to any one of clauses 1 to 49, wherein the immunogen elicits an immune response against a parasite.
[0589] Clause 60 The RNA molecule according to any one of clauses 1 to 49 or 59, wherein the immunogen is derived from a parasite.
[0590] Clause 61 The RNA molecule according to either clause 59 or 60, wherein the parasite is selected from Plasmodium, such as P. falciparum, P. vivax, P. malariae, and P. ovale and Caligidae family, particularly those from the Lepeophtheirus and Caligus genera, such as sea lice such as Lepeophtheirus salmonis or Caligus rogercresseyi.
[0591] Clause 62 The RNA molecule according to any one of clauses 1 to 49, wherein the immunogen elicits an immune response against an allergen.
[0592] Clause 63 The RNA molecule according to any one of clauses 1 to 49 or 62, wherein the immunogen is derived from an allergen.
[0593] Clause 64 The RNA molecule according to either clause 62 or 63, wherein the allergen is selected from pollen allergens (tree, herb, weed, and grass pollen allergens); insect or arachnid allergens (inhalant, saliva and venom allergens, e.g. mite allergens, cockroach and midges allergens, hymenopthera venom allergens); animal hair and dandruff allergens (from e.g. dog, cat, horse, rat, mouse, etc.); and food allergens (e.g. a gliadin). Important pollen allergens from trees, grasses and herbs are such originating from the taxonomic orders of Fagales, Oleales, Pinales and platanaceae including, but not limited to, birch (Betula), alder (Alnus), hazel (Corylus), hornbeam (Carpinus) and olive (Olea), cedar (Cryptomeria and Juniperus), plane tree (Platanus), the order of Poales including grasses of the genera Lolium, Phleum, Poa, Cynodon, Dactylis, Holcus, Phalaris, Secale, and Sorghum, the orders of Asterales and Urticales including herbs of the genera Ambrosia, Artemisia, and Parietaria. Other important inhalation allergens are those from house dust mites of the genus Dermatophagoides and Euroglyphus, storage mite e.g. Lepidoglyphys, Glycyphagus and Tyrophagus, those from cockroaches, midges and fleas e.g. Blatella, Periplaneta, Chironomus and Ctenocepphalides, and those from mammals such as cat, dog and horse, venom allergens including such originating from stinging or biting insects such as those from the taxonomic order of Hymenoptera including bees (Apidae), wasps (Vespidea), and ants (Formicoidae).
[0594] Clause 65 The RNA molecule according to any one of clauses 1 to 49, wherein the immunogen elicits an immune response against a cancer.
[0595] Clause 66 The RNA molecule according to any one of clauses 1 to 49 or 65, wherein the immunogen is a cancer antigen.
[0596] Clause 67 The RNA molecule according to either clause 65 or 66, wherein the cancer antigen is selected from (a) cancer-testis antigens such as NY-ESO-1, SSX2, SCP1 as well as RAGE, BAGE, GAGE and MAGE family polypeptides, for example, GAGE-1, GAGE-2, MAGE-1, MAGE-2, MAGE-3, MAGE-4, MAGE-5, MAGE-6, and MAGE-12 (which can be used, for example, to address melanoma, lung, head and neck, NSCLC, breast, gastrointestinal, and bladder tumors; (b) mutated antigens, for example, p53 (associated with various solid tumors, e.g., colorectal, lung, head and neck cancer), p21/Ras (associated with, e.g., melanoma, pancreatic cancer and colorectal cancer), CDK4 (associated with, e.g., melanoma), MUM1 (associated with, e.g., melanoma), caspase-8 (associated with, e.g., head and neck cancer), CIA 0205 (associated with, e.g., bladder cancer), HLA-A2-R1701, beta catenin (associated with, e.g., melanoma), TCR (associated with, e.g., T-cell non-Hodgkins lymphoma), BCR-abl (associated with, e.g., chronic myelogenous leukemia), triosephosphate isomerase, KIA 0205, CDC-27, and LDLR-FUT; (c) over-expressed antigens, for example, Galectin 4 (associated with, e.g., colorectal cancer), Galectin 9 (associated with, e.g., Hodgkin's disease), proteinase 3 (associated with, e.g., chronic myelogenous leukemia), WT 1 (associated with, e.g., various leukemias), carbonic anhydrase (associated with, e.g., renal cancer), aldolase A (associated with, e.g., lung cancer), PRAME (associated with, e.g., melanoma), HER-2/neu (associated with, e.g., breast, colon, lung and ovarian cancer), mammaglobin, alpha-fetoprotein (associated with, e.g., hepatoma), KSA (associated with, e.g., colorectal cancer), gastrin (associated with, e.g., pancreatic and gastric cancer), telomerase catalytic protein, MUC-1 (associated with, e.g., breast and ovarian cancer), G-250 (associated with, e.g., renal cell carcinoma), p53 (associated with, e.g., breast, colon cancer), and carcinoembryonic antigen (associated with, e.g., breast cancer, lung cancer, and cancers of the gastrointestinal tract such as colorectal cancer); (d) shared antigens, for example, melanoma-melanocyte differentiation antigens such as MART-1/Melan A, gp100, MC1R, melanocyte-stimulating hormone receptor, tyrosinase, tyrosinase related protein-1/TRP1 and tyrosinase related protein-2/TRP2 (associated with, e.g., melanoma); (e) prostate associated antigens such as PAP, PSA, PSMA, PSH—P1, PSM-P1, PSM-P2, associated with e.g., prostate cancer; (f) immunoglobulin idiotypes (associated with myeloma and B cell lymphomas, for example).
[0597] Clause 68 The RNA molecule according to any one of clauses 1 to 49, wherein the segment that encodes an immunogen comprises a sequence that has at least 70% identity to at least one of SEQ ID NOs: 29-31 and 123-133.
[0598] Clause 69 A recombinant RNA molecule comprising a sequence that has at least 70% identity to at least one of SEQ ID NOs: 29-31 and 123-133.
[0599] Clause 70 The recombinant RNA molecule according to clause 69, comprising a 5′ UTR.
[0600] Clause 71 The recombinant RNA molecule according to either clause 69 or 70, comprising a 3′ UTR.
[0601] Clause 72 The RNA molecule according any one of clauses 68 to 71, comprising a sequence that has at least 70% identity to SEQ ID NO: 29.
[0602] Clause 73 The RNA molecule according to clause 72, wherein the segment that encodes an immunogen consists of a sequence that has at least 70% identity to SEQ ID NO: 29.
[0603] Clause 74 The RNA molecule according any one of clauses 68 to 71, comprising a sequence that has at least 70% identity to SEQ ID NO: 30.
[0604] Clause 75 The RNA molecule according to clause 74, wherein the segment that encodes an immunogen consists of a sequence that has at least 70% identity to SEQ ID NO: 30.
[0605] Clause 76 The RNA molecule according any one of clauses 68 to 71, comprising a sequence that has at least 70% identity to SEQ ID NO: 31.
[0606] Clause 77 The RNA molecule according to clause 76, wherein the segment that encodes an immunogen consists of a sequence that has at least 70% identity to SEQ ID NO: 31.
[0607] Clause 78 The RNA molecule according any one of clauses 68 to 71, comprising a sequence that has at least 70% identity to SEQ ID NO: 123.
[0608] Clause 79 The RNA molecule according to clause 78, wherein the segment that encodes an immunogen consists of a sequence that has at least 70% identity to SEQ ID NO: 123.
[0609] Clause 80 The RNA molecule according to any one of clauses 68 to 71, comprising a sequence that has at least 70% identity to SEQ ID NO: 124.
[0610] Clause 81 The RNA molecule according to clause 80, wherein the segment that encodes an immunogen consists of a sequence that has at least 70% identity to SEQ ID NO: 124.
[0611] Clause 82 The RNA molecule according to any one of clauses 68 to 71, comprising a sequence that has at least 70% identity to SEQ ID NO: 125.
[0612] Clause 83 The RNA molecule according to clause 82, wherein the segment that encodes an immunogen consists of a sequence that has at least 70% identity to SEQ ID NO: 125.
[0613] Clause 84 The RNA molecule according to any one of clauses 68 to 71, comprising a sequence that has at least 70% identity to SEQ ID NO: 126.
[0614] Clause 85 The RNA molecule according to clause 84, wherein the segment that encodes an immunogen consists of a sequence that has at least 70% identity to SEQ ID NO: 126.
[0615] Clause 86 The RNA molecule according to any one of clauses 68 to 71, comprising a sequence that has at least 70% identity to SEQ ID NO: 127.
[0616] Clause 87 The RNA molecule according to clause 86, wherein the segment that encodes an immunogen consists of a sequence that has at least 70% identity to SEQ ID NO: 127.
[0617] Clause 88 The RNA molecule according to any one of clauses 68 to 71, comprising a sequence that has at least 70% identity to SEQ ID NO: 128.
[0618] Clause 89 The RNA molecule according to clause 88, wherein the segment that encodes an immunogen consists of a sequence that has at least 70% identity to SEQ ID NO: 128.
[0619] Clause 90 The RNA molecule according to any one of clauses 68 to 71, comprising a sequence that has at least 70% identity to SEQ ID NO: 129.
[0620] Clause 91 The RNA molecule according to clause 90, wherein the segment that encodes an immunogen consists of a sequence that has at least 70% identity to SEQ ID NO: 129.
[0621] Clause 92 The RNA molecule according to any one of clauses 68 to 71, comprising a sequence that has at least 70% identity to SEQ ID NO: 130.
[0622] Clause 93 The RNA molecule according to clause 92, wherein the segment that encodes an immunogen consists of a sequence that has at least 70% identity to SEQ ID NO: 130.
[0623] Clause 94 The RNA molecule according to any one of clauses 68 to 71, comprising a sequence that has at least 70% identity to SEQ ID NO: 131.
[0624] Clause 95 The RNA molecule according to clause 94, wherein the segment that encodes an immunogen consists of a sequence that has at least 70% identity to SEQ ID NO: 131.
[0625] Clause 96 The RNA molecule according to any one of clauses 68 to 71, comprising a sequence that has at least 70% identity to SEQ ID NO: 132.
[0626] Clause 97 The RNA molecule according to clause 96, wherein the segment that encodes an immunogen consists of a sequence that has at least 70% identity to SEQ ID NO: 132.
[0627] Clause 98 The RNA molecule according to any one of clauses 68 to 71, comprising a sequence that has at least 70% identity to SEQ ID NO: 133.
[0628] Clause 99 The RNA molecule according to clause 98, wherein the segment that encodes an immunogen consists of a sequence that has at least 70% identity to SEQ ID NO: 133.
[0629] Clause 100 The RNA molecule according to any one of clauses 68 to 99, comprising a sequence that has at least 80% sequence identity to the reference sequence.
[0630] Clause 101 The RNA molecule according to clause 100, comprising a sequence that has at least 90% sequence identity to the reference sequence.
[0631] Clause 102 The RNA molecule according to clause 101, comprising a sequence that has at least 95% sequence identity to the reference sequence.
[0632] Clause 103 The RNA molecule according to clause 102, comprising a sequence that has at least 97% sequence identity to the reference sequence.
[0633] Clause 104 The RNA molecule according to clause 103, comprising a sequence that has at least 98% sequence identity to the reference sequence.
[0634] Clause 105 The RNA molecule according to clause 104, comprising a sequence that has at least 99% sequence identity to the reference sequence.
[0635] Clause 106 The RNA molecule according to clause 105, comprising a sequence that has 100% sequence identity to the reference sequence.
[0636] Clause 107 The RNA molecule according to any preceding claim, comprising further segments that encode other heterologous polypeptides, such as one further segment.
[0637] Clause 108 The RNA molecule according to any preceding claim comprising a sequence that has at least 70% identity to at least one of SEQ ID NOs: 32-40, 45-62, 69-77, 82-90, 134-173, and 178-197.
[0638] Clause 109 The RNA molecule according to clause 108, comprising a sequence that has at least 80% sequence identity to the reference sequence.
[0639] Clause 110 The RNA molecule according to clause 108, comprising a sequence that has at least 90% sequence identity to the reference sequence.
[0640] Clause 111 The RNA molecule according to clause 108, comprising a sequence that has at least 95% sequence identity to the reference sequence.
[0641] Clause 112 The RNA molecule according to clause 108, comprising a sequence that has at least 97% sequence identity to the reference sequence.
[0642] Clause 113 The RNA molecule according to clause 108, comprising a sequence that has at least 98% sequence identity to the reference sequence.
[0643] Clause 114 The RNA molecule according to clause 108, comprising a sequence that has at least 99% sequence identity to the reference sequence.
[0644] Clause 115 The RNA molecule according to clause 108, comprising a sequence that has 100% sequence identity to the reference sequence.
[0645] Clause 116 The RNA molecule according to any one of clauses 1 to 115, comprising a 3′ poly(A).
[0646] Clause 117 The RNA molecule according to clause 116, wherein the 3′ poly(A) is 3′ of a 3′ UTR.
[0647] Clause 118 The RNA molecule according to either clause 116 or 117, wherein the 3′ poly(A)) tail is at the 3′ end of the recombinant RNA.
[0648] Clause 119 The RNA molecule according to any one of clauses 116 to 118, wherein the 3′ poly(A) comprises a first segment of consecutive adenosine monophosphate residues, a spacer, and a second segment of consecutive adenosine monophosphate residues and wherein the spacer comprises at least one nucleotide other than adenosine monophosphate.
[0649] Clause 120 The RNA molecule according to any one of clauses 116 to 119, wherein the 3′ poly(A) comprises, or where the 3′ poly(A) comprises a first and a second segment of consecutive adenosine monophosphates the first segment comprises, 20 to 150 consecutive adenosine monophosphates.
[0650] Clause 121 The RNA molecule according to clause 120, wherein the 3′ poly(A) comprises, or where the 3′ poly(A) comprises a first and a second segment of consecutive adenosine monophosphates the first segment comprises, 50 to 120 consecutive adenosine monophosphates.
[0651] Clause 122 The RNA molecule according to clause 121, wherein the 3′ poly(A) comprises, or where the 3′ poly(A) comprises a first and a second segment of consecutive adenosine monophosphates the first segment comprises, 70 to 100 consecutive adenosine monophosphates.
[0652] Clause 123 The RNA molecule according to any one of clauses 116 to 122, wherein the second segment comprises 20 to 150 consecutive adenosine monophosphates.
[0653] Clause 124 The RNA molecule according to clause 123, wherein the second segment comprises 50 to 120 consecutive adenosine monophosphates.
[0654] Clause 125 The RNA molecule according to clause 123, wherein the second segment comprises 70 to 100 consecutive adenosine monophosphates.
[0655] Clause 126 The RNA molecule according to any one of clauses 1 to 125 comprising a 5′ cap.
[0656] Clause 127 The RNA molecule according to clause 126, wherein the 5′ cap comprises a 5′ cap nucleoside (e.g. a 7-methylguanosine or a modified 7-methylguanosine) and a first 5′ ribonucleoside; wherein the 5′ cap nucleoside (e.g. the 7-methylguanosine or the modified 7-methylguanosine) is linked 5′-to-5′ to the first 5′ ribonucleoside.
[0657] Clause 128 The RNA molecule according to clause 127, wherein the first 5′ ribonucleoside comprises a 2′ methylated ribose.
[0658] Clause 129 The RNA molecule according to either clause 127 or 128, comprising a linker; wherein the 5′ cap nucleoside (e.g. the 7-methylguanosine or the modified 7-methylguanosine) is linked 5′-to-5′ to the first 5′ ribonucleoside by the linker.
[0659] Clause 130 The RNA molecule according to clause 129, wherein the linker is a triphosphate.
[0660] Clause 131 The RNA molecule according to any one of clauses 1 to 130, comprising at least one modified nucleotide.
[0661] Clause 132 The RNA molecule according to clause 131, comprising pseudouridine, N1-methylpseudouridine, or N1-ethylpseudouridine.
[0662] Clause 133 The RNA molecule according to clause 132, wherein at least 80% of the uridine residues are replaced with pseudouridine, N1-methylpseudouridine, or N1-ethylpseudouridine.
[0663] Clause 134 The RNA molecule according to clause 132, wherein at least 90% of the uridine residues are replaced with pseudouridine, N1-methylpseudouridine, or N1-ethylpseudouridine.
[0664] Clause 135 The RNA molecule according to clause 132, wherein at least 95% of the uridine residues are replaced with pseudouridine, N1-methylpseudouridine, or N1-ethylpseudouridine.
[0665] Clause 136 The RNA molecule according to clause 132, wherein at least 99% of the uridine residues are replaced with pseudouridine, N1-methylpseudouridine, or N1-ethylpseudouridine.
[0666] Clause 137 The RNA molecule according to any one of clauses 1 to 136, comprising a sequence that has at least 95% identity to at least one of SEQ ID NOs: 32, 33, 35, 36, 38, 39, 45, 46, 48, 49, 51, 52, 54, 55, 57, 58, 60, 61, 69, 70, 72, 73, 75, 76, 82, 83, 85, 86, 89, 134, 135, 138, 139, 142, 143, 146, 147, 150, 151, 154, 155, 158, 159, 162, 163, 166, 167, 170, 171, 174, 175, 178, 179, 182, 183, 186, 187, 190, 191, 194, and 195.
[0667] Clause 138 The RNA molecule according to clause 137, consisting of a sequence that has at least 95% identity to at least one of SEQ ID NOs: 32, 33, 35, 36, 38, 39, 45, 46, 48, 49, 51, 52, 54, 55, 57, 58, 60, 61, 69, 70, 72, 73, 75, 76, 82, 83, 85, 86, 89, 134, 135, 138, 139, 142, 143, 146, 147, 150, 151, 154, 155, 158, 159, 162, 163, 166, 167, 170, 171, 174, 175, 178, 179, 182, 183, 186, 187, 190, 191, 194, and 195.
[0668] Clause 139 The RNA molecule according to either clause 137 or 138, comprising a sequence that has at least 98% identity to the reference sequence.
[0669] Clause 140 The RNA molecule according to clause 139, comprising a sequence that has at least 99% identity to the reference sequence.
[0670] Clause 141 The RNA molecule according to clause 139, comprising a sequence that has at least 100% identity to the reference sequence.
[0671] Clause 142 The RNA molecule according to any one of clauses 1 to 141, comprising a sequence that has at least 95% identity to at least one of SEQ ID NOs: 32-40, 45-62, 69-77, 82-90, 134-173, and 178-197.
[0672] Clause 143 The RNA molecule according to clause 142, consisting of a sequence that has at least 95% identity to at least one of SEQ ID NOs: 32-40, 45-62, 69-77, 82-90, 134-173, and 178-197.
[0673] Clause 144 The RNA molecule according to either clause 141 or 143, comprising a sequence that has at least 98% identity to the reference sequence.
[0674] Clause 145 The RNA molecule according to clause 144, comprising a sequence that has at least 99% identity to the reference sequence.
[0675] Clause 146 The RNA molecule according to clause 145, comprising a sequence that has at least 100% identity to the reference sequence.
[0676] Clause 147 The RNA molecule according to any one of clauses 1 to 146, wherein the RNA molecule is self-replicating.
[0677] Clause 148 The RNA molecule according to any one of clauses 1 to 147, wherein the RNA molecule is not self-replicating.
[0678] Clause 149 The RNA molecule according to any one of clauses 1 to 148, wherein the encoded heterologous polypeptide contains 100 to 1500 amino acid residues.
[0679] Clause 150 The RNA molecule according to clause 149, wherein the encoded heterologous polypeptide contains 100 to 500 amino acid residues.
[0680] Clause 151 The RNA molecule according to clause 149, wherein the encoded heterologous polypeptide contains 500 to 1000 amino acid residues.
[0681] Clause 152 The RNA molecule according to clause 149, wherein the encoded heterologous polypeptide contains 1000 to 1500 amino acid residues.
[0682] Clause 153 The RNA molecule according to any one of clauses 1 to 152, wherein the RNA molecule is 1500-15000 nucleotides long.
[0683] Clause 154 The RNA molecule according to clause 149, wherein the RNA molecule is 2000-5000 nucleotides long.
[0684] Clause 155 The RNA molecule according to clause 149, wherein the RNA molecule is 3000-6000 nucleotides long.
[0685] Clause 156 The RNA molecule according to clause 149, wherein the RNA molecule is 8000-15000 nucleotides long.
[0686] Clause 157 A formulation comprising lipid nanoparticles (LNPs) and recombinant RNA molecules of any one of clauses 1 to 156; wherein:
   [0687] i) the LNPs comprise lipids;
   [0688] ii) the lipids comprise first lipids and cholesterol;
   [0689] iii) the first lipid comprises a tertiary amine and has a pKa from 5.0 to 7.6;
   [0690] iv) at least half of the first lipids are neutrally charged when the first lipids are at a pH that is above the pKa; and
   [0691] v) at least half of the first lipids are positively charged when the first lipids are at a pH that is below the pKa.
[0692] Clause 158 The formulation of clause 157, wherein at least 80% of the recombinant RNA molecules are encapsulated by the LNPs, such as at least 90%, especially at least 95%.
[0693] Clause 159 The formulation of either clause 157 or 158, wherein the Z-average diameter is from 50 to 200 nm.
[0694] Clause 160 The formulation of clause 159, wherein the Z-average diameter is from 60 to 180 nm.
[0695] Clause 161 The formulation of clause 160, wherein the Z-average diameter is from 80 to 160 nm.
[0696] Clause 162 The formulation of any one of clauses 157 to 161, wherein the polydispersity index is 0.3 or lower.
[0697] Clause 163 The formulation of clause 162, wherein the polydispersity index is 0.2 or lower.
[0698] Clause 164 The formulation of any one of clauses 157 to 163, wherein the first lipid has a pKa from 5.2 to 7.0 Clause 165 The formulation of clause 164, wherein the first lipid has a pKa from 5.5 to 6.8.
[0699] Clause 166 The formulation of any one of clauses 157 to 165, wherein the first lipids comprise the following:

[chemical structure]

[chemical structure]

[0700] Clause 167 The formulation of any one of clauses 157 to 166, wherein the first lipids consist of the following:

[chemical structure]

[0701] Clause 168 The formulation of any one of clauses 157 to 166, wherein the first lipids comprise

[chemical structure]

[0702] Clause 169 The formulation of any one of clauses 157 to 166, wherein the first lipids comprise:

[chemical structure]

[0703] Clause 170 The formulation of any one of clauses 157 to 166, wherein the first lipids comprise:

[chemical structure]

[0704] Clause 171 The formulation of any one of clauses 157 to 170, wherein the lipids comprise polyethylene glycol-conjugated (PEG-conjugated) lipids.
[0705] Clause 172 The formulation of clause 171, wherein the PEG-conjugated lipid comprises 1,2-dimyristoyl-rac-glycero-3-methoxypolyethylene glycol.
[0706] Clause 173 The formulation of clause 171, wherein the PEG-conjugated lipid comprises 2-[(polyethylene glycol)-2000]—N,N-ditetradecylacetamide.
[0707] Clause 174 The formulation of any one of clauses 157 to 173, wherein the lipids comprise a neutral lipid or a zwitterionic lipid.
[0708] Clause 175 The formulation of clause 174, wherein the zwitterionic lipid comprises 1,2-distearoyl-sn-glycero-3-phosphocholine (DSPC).
[0709] Clause 176 A method of eliciting an immune response against the immunogen in a subject, the method comprising administering to the subject an effective amount to elicit the immune response of the recombinant RNA molecule of any one of clauses 1 to 156 comprising a segment encoding an immunogen, or the formulation of any one of clauses 157 to 175 comprising a recombinant RNA molecule comprising a segment encoding an immunogen.
[0710] Clause 177 Use of the RNA molecule of any one of clauses 1 to 156 for the manufacture of a medicament.
[0711] Clause 178 Use of the RNA molecule of any one of clauses 1 to 156 comprising a segment encoding an immunogen for the manufacture of a medicament for eliciting an immune response to the immunogen in a subject.
[0712] Clause 179 Use of the RNA molecule of any one of clauses 1 to 156 comprising a segment encoding an immunogen derived from a pathogen for the manufacture of a medicament for prophylaxis of infection by the pathogen in a subject.
[0713] Clause 180 Use of the RNA molecule of any one of clauses 1 to 156 comprising a segment encoding an immunogen derived from a pathogen for the manufacture of a medicament for treatment of infection by the pathogen in a subject.
[0714] Clause 181 Use of the RNA molecule of any one of clauses 1 to 156 comprising a segment encoding an heterologous polypeptide for the manufacture of a medicament for the in vivo expression of the heterologous polypeptide in a subject.
[0715] Clause 182 The RNA of any one of clauses 1 to 156 for use as a medicament.
[0716] Clause 183 The RNA molecule of any one of clauses 1 to 156 comprising a segment encoding an immunogen for use in eliciting an immune response to the immunogen in a subject.
[0717] Clause 184 The RNA molecule of any one of clauses 1 to 156 comprising a segment encoding an immunogen derived from a pathogen for use in prophylaxis of infection by the pathogen in a subject.
[0718] Clause 185 The RNA molecule of any one of clauses 1 to 156 comprising a segment encoding an immunogen derived from a pathogen for use in treatment of infection by the pathogen in a subject.
[0719] Clause 186 The RNA molecule of any one of clauses 1 to 156 comprising a segment encoding an heterologous polypeptide for use in the in vivo expression of the heterologous polypeptide in a subject.
[0720] Clause 187 The RNA molecule, method or use according to any one of clauses 176 to 186 for a human subject.
[0721] Clause 188 The RNA molecule, method or use according to clause 187 for a human subject less than 18 years old.
[0722] Clause 189 The RNA molecule, method or use according to clause 187 for a human subject at least 18 years old.
[0723] Clause 190 The RNA molecule, method or use according to clause 187 for a human subject at least 60 years old.
[0724] Clause 191 The RNA molecule, method or use according to any one of clauses 176 to 190 for eliciting an antibody response.
[0725] Clause 192 The RNA molecule, method or use according to any one of clauses 176 to 191 for eliciting a cellular immune response.
[0726] Clause 193 The RNA molecule, method or use according to any one of clauses 176 to 192 for eliciting a protective immune response.
[0727] Clause 194 The RNA molecule, method or use according to any one of clauses 176 to 193 for intramuscular administration.
[0728] Clause 195 The RNA molecule, method or use according to any one of clauses 176 to 194 for administration at a dose of 1 to 150 μg of RNA.
[0729] Clause 196 The RNA molecule, method or use according to clause 195 for administration art a dose of 10 to 100 μg of RNA.
[0730] Clause 197 The RNA molecule, method or use according to clause 196 for administration art a dose of 10 to 80 μg of RNA, such as 10 to 60 ug.
[0731] Clause 198 The RNA molecule according to any one of clauses 1 to 156, wherein the heterologous polypeptide is a fusion protein of a plurality of immunogens.
[0732] Clause 199 The RNA molecule according to any one of clauses 1 to 156 or 198, comprising a plurality of segments encoding heterologous polypeptides.
[0733] Clause 200 The formulation according to any one of clauses 157 to 175, comprising a plurality of RNA molecules comprising segments encoding different heterologous polypeptides.
[0734] Clause 201 A composition comprising a plurality of formulations according to any one of clauses 156 to 175 or 200, the formulations comprising RNA molecules comprising segments encoding different heterologous polypeptides.
[0735] Clause 202 A method of manufacturing the recombinant RNA molecule of any one of clauses 1 to 156, 199 or 200, the method comprising admixing an RNA polymerase, triphosphate nucleotides, and a template nucleic acid comprising a sequence of the recombinant RNA molecule, thereby obtaining an admixture; the admixing being under conditions wherein the RNA polymerase produces the recombinant RNA molecule from the template nucleic acid.
[0736] Clause 203 A method of manufacturing the formulation of any one of clauses 156 to 175 or 200, the method comprising:
   [0737] a. admixing the recombinant RNA molecules with an aqueous buffer, thereby obtaining an aqueous recombinant RNA solution;
   [0738] b. admixing the lipids in an organic solvent, thereby obtaining a lipid solution;
   [0739] c. admixing the lipid solution and the recombinant RNA solution with at least a T-mixer, a microfluidics mixer, or an impinging jet mixer, thereby obtaining a first solution, wherein the first solution comprises the LNPs, wherein at least some of the recombinant RNA molecules are encapsulated in the LNPs; and d. purifying the LNPs to obtain the at least 80% of the recombinant RNA molecules
[0740] being encapsulated by the LNPs.

### EXAMPLES

### General In Vitro Methods

### Design and In Vitro Transcription of RNA

[0741] For the experiments with firefly luciferase, UTRs from beta-actin gene (ACTB, Accession NO: NM_001101.5; SEQ ID NOs: 15 & 16), albumin gene (ALB or UTR1, Accession NOs: NG_056261.1 & NM_000477.7; SEQ ID NOs: 1 & 2), adenosine triphosphate (ATP) synthase beta subunit gene (ATPSB or UTR2, Accession NOs: AH002618.2 & NM_001686.4; SEQ ID NOs: 3 & 4), fibroblast activation protein messenger ribonucleic acid (mRNA) (FAP or UTR 3, SEQ ID NOs: 5 & 6, Accession NOs: U09278.2 & NM_001291807.3), H4 clustered histone 15 mRNA (HIST2H4A or UTR4, SEQ ID NOs: 7 & 8; Accession NO: NR_168448.1), glyceraldehyde-3-phosphate dehydrogenase gene (GAPDH or UTR5, Accession NOs: NG_007073.2 & NR_152150.2; SEQ ID NOs: 9 & 10), heat shock protein family A (Hsp70) member 8 gene (HSPA8 or UTR6, Accession NOs: NG_029473.1 & NM_153201.4; SEQ ID NOs: 11 & 12), interleukin-2 gene (IL-2 or UTR7; Accession NOs: AH002842.2 & NM_000586.4; SEQ ID NOs: 13 & 14), transferrin gene (TF, Accession NO: NG_013080.2; SEQ ID NOs: 17 & 18), and eukaryotic translation elongation factor 2 (EEF2) mRNA (Accession NO: NM_001961.4; SEQ ID NOs: 19 & 20) surrounded the gene from firefly luciferase and were imported into plasmid DNA. For UTR1-7, the resulting plasmid DNAs were SEQ ID NOs: 104-110 respectively. For the ACTB UTR, TF UTR, and EEF2 UTRS, the resulting plasmid DNAs were SEQ ID NOs: 111-113 respectively. In vitro transcription of the plasmid DNAs containing SEQ ID NOs: 104-113 were carried out to obtain RNA, which was then transfected into the cells as described below.

[0742] For the experiments with a SARS-CoV-2 spike protein from either the omicron strain or Wuhan strain encoded within the RNA, sequences were designed that incorporated one of UTR1-7, the UTRs in Moderna's 1273-mRNA, the UTRs in Pfizer/BioNTech's BNT-161, or the UTRs in CureVac's as described in positions 17-3838 of the sequence in The World Health Organization: International Nonproprietary Names Programme. Messenger RNA Encoding the Full-Length SARS-CoV-2 Spike Glycoprotein; p. 11868, which is further described in Edo Kon, Uri Elia, and Dann Peer, “Principles for designing an optimal mRNA lipid nanoparticle vaccine,” Curr. Opin. Biotechnol. 2022, 73:329-336.

[0743] All of the SARS-CoV-2 spike proteins from either the omicron strain or Wuhan strain were designed with two substitutions of the wild-type amino acids for prolines to result in a proline-proline prefusion stabilization. For the omicron strain, these are at amino acid positions 983 and 984 of Accession No. UF069279.1, or in the case of the BA.5 strain these are amino acid positions 981 and 982 of the spike glycoprotein, and for the Wuhan strain, they are located at amino acid positions 986 and 987 of the spike glycoprotein. For the SARS-CoV-2 omicron and Wuhan strain spike proteins, the proteins with the proline-proline substitution were simultaneously reverse translated and optimized by 1) a commercial software that only optimized for a codon adaptation index of 0.7 or greater (see e.g. SEQ ID NO: 31); 2) IDT technologies commercial software (see e.g. SEQ ID NO: 118); 3) a proprietary algorithm referred to as CR1 (see e.g. SEQ ID NO: 29); or 4) a proprietary algorithm referred to as CR1, CR2 (see e.g. SEQ ID NO: 30; see e.g. constructs LL34-38), CR3, CR4, CR5, CR6, or CR7 respectively. Constructs LL40-44 and LL60-67 were also optimized by CR3-7, respectively.

[0744] To allow for adjustment of the 3′ poly(adenosine monophosphate) (poly(A)) tail, a BsrDI restriction site, 5′-UUCAUUGC-3′ was added downstream (3′) of the 3′ UTR but before the 3′ poly(A) tail if those UTRs did not already terminate with a BsrDI restriction site. To allow for a Trilink CLEAN CAP® recognition site, an adenosine monophosphate (A) and/or one or more guanosine monophosphates (G) were added 5′ of the 5′ UTR in one of the following patterns “A,” “AG,” or “AGG.” In some embodiments, a representative split 3′ poly(A) tail was provided, and in other embodiments, the 3′ poly(A) tail consisted of As. Accordingly, following sequences were designed, and produced as identified in the examples below:

| | | | SEQ ID NO. of the complete molecule | | |
|---|---|---|---|---|---|
| | | | | With BsrD1 | |
| | | | | restriction site, | |
| | | | Without: BsrD1 | without | With: BsrD1 |
| | | | restriction site, | representative | restriction site, |
| | | | representative | 3′ poly(A) tail, | representative |
| | | | 3′ poly(A) tail, | without CLEAN | 3′ poly(A) tail, |
| Construct | 3′ and 5′ | Coding | CLEAN CAP ® | CAP ® | CLEAN CAP ® |
| Name | UTRs | Sequence | recognition site | recognition site | recognition site |
| KM61 | UTR3 | SARS-CoV-2 | SEQ ID NO: 32 | SEQ ID NO: 33 | SEQ ID NO: 34 |
| | (SEQ ID | omicron spike | | | |
| | NOs: | protein optimized | | | |
| | 5 & 6) | by commercial | | | |
| | | software with codon | | | |
| | | adaptation index | | | |
| | | (CAI) ≥ 0.7 | | | |
| | | (SEQ ID NO: 31) | | | |
| KM62 | UTR4 | SARS-CoV-2 | SEQ ID NO: 35 | SEQ ID NO: 36 | SEQ ID NO: 37 |
| | (SEQ ID | omicron spike | | | |
| | NOs: | protein optimized | | | |
| | 7 & 8) | by commercial | | | |
| | | software with | | | |
| | | CAI ≥ 0.7 | | | |
| | | (SEQ ID NO: 31) | | | |
| KM63 | UTR7 | SARS-CoV-2 | SEQ ID NO: 38 | SEQ ID NO: 39 | SEQ ID NO: 40 |
| | (SEQ ID | omicron spike | | | |
| | NOs: | protein optimized | | | |
| | 13 & 14) | by commercial | | | |
| | | software with | | | |
| | | CAI ≥ 0.7 | | | |
| | | (SEQ ID NO: 31) | | | |
| KM64 | BioNTech- | SARS-CoV-2 | | SEQ ID NO: 41 | SEQ ID NO: 42 |
| | 161 (SEQ | omicron spike | | | |
| | ID NOS: | protein optimized | | | |
| | 21 & 22) | by commercial | | | |
| | | software with | | | |
| | | CAI ≥ 0.7 | | | |
| | | (SEQ ID NO: 31) | | | |
| KM65 | Moderna | SARS-CoV-2 | | SEQ ID NO: 43 | SEQ ID NO: 44 |
| | 1273- | omicron spike | | | |
| | mRNA | protein optimized | | | |
| | UTRs | by commercial | | | |
| | (SEQ ID | software with | | | |
| | NOs: | CAI ≥ 0.7 | | | |
| | 23 & 24) | (SEQ ID NO: 31) | | | |
| KM66 | UTR3 | SARS-CoV-2 | SEQ ID NO: 45 | SEQ ID NO: 46 | SEQ ID NO: 47 |
| | (SEQ ID | omicron spike | | | |
| | NOs: | protein optimized | | | |
| | 5 & 6) | by CR1 (SEQ | | | |
| | | ID NO: 29) | | | |
| KM67 | UTR4 | SARS-CoV-2 | SEQ ID NO: 48 | SEQ ID NO: 49 | SEQ ID NO: 50 |
| | (SEQ ID | omicron spike | | | |
| | NOs: | protein optimized | | | |
| | 7 & 8) | by CR1 (SEQ | | | |
| | | ID NO: 29) | | | |
| KM68 | UTR7 | SARS-CoV-2 | SEQ ID NO: 51 | SEQ ID NO: 52 | SEQ ID NO: 53 |
| | (SEQ ID | omicron spike | | | |
| | NOs: | protein optimized | | | |
| | 13 & 14) | by CR1 (SEQ | | | |
| | | ID NO: 29) | | | |
| KM69 | UTR3 | SARS-CoV-2 | SEQ ID NO: 54 | SEQ ID NO: 55 | SEQ ID NO: 56 |
| | (SEQ ID | omicron spike | | | |
| | NOs: | protein optimized | | | |
| | 5 & 6) | by CR2 (SEQ | | | |
| | | ID NO: 30) | | | |
| KM70 | UTR4 | SARS-CoV-2 | SEQ ID NO: 57 | SEQ ID NO: 58 | SEQ ID NO: 59 |
| | (SEQ ID | omicron spike | | | |
| | NOs: | protein optimized | | | |
| | 7 & 8) | by CR2 (SEQ | | | |
| | | ID NO: 30) | | | |
| KM71 | UTR7 | SARS-CoV-2 | SEQ ID NO: 60 | SEQ ID NO: 61 | SEQ ID NO: 62 |
| | (SEQ ID | omicron spike | | | |
| | NOs: | protein optimized | | | |
| | 13 & 14) | by CR2 (SEQ | | | |
| | | ID NO: 30) | | | |
| KM72 | CureVac | SARS-CoV-2 | | SEQ ID NO: 63 | SEQ ID NO: 64 |
| | (SEQ ID | omicron spike | | | |
| | NOs: | protein optimized | | | |
| | 27 & 28) | by commercial | | | |
| | | software with | | | |
| | | CAI ≥ 0.7 | | | |
| | | (SEQ ID NO: 31) | | | |
| KM80 | Moderna | SARS-CoV-2 | | SEQ ID NO: 65 | SEQ ID NO: 66 |
| | 1273- | Wuhan spike | | | |
| | mRNA | protein optimized | | | |
| | UTRs | by commercial | | | |
| | (SEQ ID | software with | | | |
| | NOs: | CAI ≥ 0.7 | | | |
| | 23 & 24) | (SEQ ID NO: 117) | | | |
| KM81 | BioNTech | SARS-CoV-2 | | SEQ ID NO: 67 | SEQ ID NO: 68 |
| | (SEQ ID | Wuhan spike | | | |
| | NOs: | protein optimized | | | |
| | 21 & 22) | by commercial | | | |
| | | software with | | | |
| | | CAI ≥ 0.7 | | | |
| | | (SEQ ID NO: 117) | | | |
| KM82 | UTR3 | SARS-CoV-2 | SEQ ID NO: 69 | SEQ ID NO: 70 | SEQ ID NO: 71 |
| | (SEQ ID | Wuhan spike | | | |
| | NOs: | protein optimized | | | |
| | 5 & 6) | by commercial | | | |
| | | software with | | | |
| | | CAI ≥ 0.7 | | | |
| | | (SEQ ID NO: 117) | | | |
| KM83 | UTR4 | SARS-CoV-2 | SEQ ID NO: 72 | SEQ ID NO: 73 | SEQ ID NO: 74 |
| | (SEQ ID | Wuhan spike | | | |
| | NOs: | protein optimized | | | |
| | 7 & 8) | by commercial | | | |
| | | software with | | | |
| | | CAI ≥ 0.7 | | | |
| | | (SEQ ID NO: 117) | | | |
| KM84 | UTR7 | SARS-CoV-2 | SEQ ID NO: 75 | SEQ ID NO: 76 | SEQ ID NO: 77 |
| | (SEQ ID | Wuhan spike | | | |
| | NOs: | protein optimized | | | |
| | 13 & 14) | by commercial | | | |
| | | software with | | | |
| | | CAI ≥ 0.7 | | | |
| | | (SEQ ID NO: 117) | | | |
| KM85 | Moderna | SARS-CoV-2 | | SEQ ID NO: 78 | SEQ ID NO: 79 |
| | 1273- | Wuhan spike | | | |
| | mRNA | protein optimized | | | |
| | (SEQ ID | by commercial | | | |
| | NOs: | software with | | | |
| | 23 & 24) | CAI ≥ 0.7 | | | |
| | | (SEQ ID NO: 97) | | | |
| KM86 | BioNTech | SARS-CoV-2 | | SEQ ID NO: 80 | SEQ ID NO: 81 |
| | (SEQ ID | Wuhan spike | | | |
| | NOs: | protein optimized | | | |
| | 21 & 22) | by commercial | | | |
| | | software with | | | |
| | | CAI ≥ 0.7 | | | |
| | | (SEQ ID NO: 97) | | | |
| KM87 | UTR3 | SARS-CoV-2 | SEQ ID NO: 82 | SEQ ID NO: 83 | SEQ ID NO: 84 |
| | (SEQ ID | Wuhan spike | | | |
| | NOs: | protein optimized | | | |
| | 5 & 6) | by commercial | | | |
| | | software with | | | |
| | | CAI ≥ 0.7 | | | |
| | | (SEQ ID NO: 97) | | | |
| KM88 | UTR4 | SARS-CoV-2 | SEQ ID NO: 85 | SEQ ID NO: 86 | SEQ ID NO: 87 |
| | (SEQ ID | Wuhan spike | | | |
| | NOs: | protein optimized | | | |
| | 7 & 8) | by commercial | | | |
| | | software with | | | |
| | | CAI ≥ 0.7 | | | |
| | | (SEQ ID NO: 97) | | | |
| KM89 | UTR7 | SARS-CoV-2 | SEQ ID NO: 88 | SEQ ID NO: 89 | SEQ ID NO: 90 |
| | (SEQ ID | Wuhan spike | | | |
| | NOs: | protein optimized | | | |
| | 13 & 14) | by commercial | | | |
| | | software with | | | |
| | | CAI ≥ 0.7 | | | |
| | | (SEQ ID NO: 97) | | | |
| JW48 | Moderna- | SARS-CoV-2 | | SEQ ID NO: 91 | SEQ ID NO: 92 |
| | like UTR | Wuhan spike | | | |
| | | protein designed | | | |
| | | by commercial | | | |
| | | software | | | |
| | | (SEQ ID NO: 118) | | | |
| KM96 | BioNTech | SARS-CoV-2 | | SEQ ID NO: 93 | SEQ ID NO: 94 |
| | (SEQ ID | omicron spike | | | |
| | NOs: | protein optimized | | | |
| | 21 & 22) | by CR2 (SEQ | | | |
| | | ID NO: 30) | | | |
| VAC3 | CureVac | SARS-CoV-2 | | SEQ ID NO: 95 | SEQ ID NO: 96 |
| | (SEQ ID | Wuhan spike | | | |
| | NOs: | protein from The | | | |
| | 27 & 28) | World Health | | | |
| | | Organization: | | | |
| | | International | | | |
| | | Nonproprietary | | | |
| | | Names | | | |
| | | Programme. | | | |
| | | Messenger RNA | | | |
| | | Encoding the | | | |
| | | Full-Length | | | |
| | | SARS-CoV-2 Spike | | | |
| | | Glycoprotein; p. | | | |
| | | 11868, which is | | | |
| | | further described in | | | |
| | | Edo Kon, Uri Elia, | | | |
| | | and Dann Peer, | | | |
| | | “Principles for | | | |
| | | designing an | | | |
| | | optimal mRNA lipid | | | |
| | | nanoparticle | | | |
| | | vaccine,” Curr. | | | |
| | | Opin. Biotechnol. | | | |
| | | 2022, 73: 329-336 | | | |
| | | (SEQ ID NO: 116) | | | |

[0745] KM63T was a replicated batch of KM63.

[0746] The following sequences were also designed, and produced as identified in the examples below:

| | | | SEQ ID NO. of the complete molecule | | | |
|---|---|---|---|---|---|---|
| | | | | | With Xba | With Xba |
| | | | | With Xba | Restriction | Restriction |
| | | | | Restriction | Site and | Site and |
| | | | | Site, Without: | Illustrative | Illustrative |
| | | | | Illustrative | Cap | Cap |
| | | | | Cap | Consensus | Consensus |
| | | | | Consensus | Sequence, | Sequence, |
| | 3′ and | | | Sequence, | Without: | Without: |
| Construct | 5′ | Coding | Without Xba | representative | representative | representative |
| Name | UTRs | Sequence | Restriction Site | 3′ poly(A) tail, | 3′ poly(A) tail, | 3′ poly(A) tail, |
| LL34 | UTR4 | SARS-CoV- | SEQ ID NO: | SEQ ID NO: | SEQ ID NO: | SEQ ID NO: |
| | (SEQ | 2 omicron | 44 | 45 | 46 | 47 |
| | ID | BA1 spike | | | | |
| | NOs: | protein | | | | |
| | 7 & 8) | optimized | | | | |
| | | by | | | | |
| | | CR3 (SEQ | | | | |
| | | ID NO: 33) | | | | |
| LL35 | UTR4 | SARS-CoV- | SEQ ID NO: | SEQ ID NO: | SEQ ID NO: | SEQ ID NO: |
| | (SEQ | 2 omicron | 48 | 49 | 50 | 51 |
| | ID | BA1 spike | | | | |
| | NOs: | protein | | | | |
| | 7 & 8) | optimized | | | | |
| | | by | | | | |
| | | CR4 (SEQ | | | | |
| | | ID NO: 34) | | | | |
| LL36 | UTR4 | SARS-CoV- | SEQ ID NO: | SEQ ID NO: | SEQ ID NO: | SEQ ID NO: |
| | (SEQ | 2 omicron | 52 | 53 | 54 | 55 |
| | ID | BA1 spike | | | | |
| | NOs: | protein | | | | |
| | 7 & 8) | optimized | | | | |
| | | by | | | | |
| | | CR5 (SEQ | | | | |
| | | ID NO: 35) | | | | |
| LL37 | UTR4 | SARS-CoV- | SEQ ID NO: | SEQ ID NO: | SEQ ID NO: | SEQ ID NO: |
| | (SEQ | 2 omicron | 56 | 57 | 58 | 59 |
| | ID | BA1 spike | | | | |
| | NOs: | protein | | | | |
| | 7 & 8) | optimized | | | | |
| | | by | | | | |
| | | CR6 (SEQ | | | | |
| | | ID NO: 36) | | | | |
| LL38 | UTR4 | SARS-CoV- | SEQ ID NO: | SEQ ID NO: | SEQ ID NO: | SEQ ID NO: |
| | (SEQ | 2 omicron | 60 | 61 | 62 | 63 |
| | ID | BA1 spike | | | | |
| | NOs: | protein | | | | |
| | 7 & 8) | optimized | | | | |
| | | by | | | | |
| | | CR7 (SEQ | | | | |
| | | ID NO: 37) | | | | |
| LL40 | UTR7 | SARS-CoV- | SEQ ID NO: | SEQ ID NO: | SEQ ID NO: | SEQ ID NO: |
| | (SEQ | 2 omicron | 64 | 65 | 66 | 67 |
| | ID | BA1 spike | | | | |
| | NOs: | protein | | | | |
| | 13 & | optimized | | | | |
| | 14) | by | | | | |
| | | CR3 (SEQ | | | | |
| | | ID NO: 33) | | | | |
| LL41 | UTR7 | SARS-CoV- | SEQ ID NO: | SEQ ID NO: | SEQ ID NO: | SEQ ID NO: |
| | (SEQ | 2 omicron | 68 | 69 | 70 | 71 |
| | ID | BA1 spike | | | | |
| | NOs: | protein | | | | |
| | 13 & | optimized | | | | |
| | 14) | by | | | | |
| | | CR4 (SEQ | | | | |
| | | ID NO: 34) | | | | |
| LL42 | UTR7 | SARS-CoV- | SEQ ID NO: | SEQ ID NO: | SEQ ID NO: | SEQ ID NO: |
| | (SEQ | 2 omicron | 72 | 73 | 74 | 75 |
| | ID | BA1 spike | | | | |
| | NOs: | protein | | | | |
| | 13 & | optimized | | | | |
| | 14) | by | | | | |
| | | CR5 (SEQ | | | | |
| | | ID NO: 35) | | | | |
| LL43 | UTR7 | SARS-CoV- | SEQ ID NO: | SEQ ID NO: | SEQ ID NO: | SEQ ID NO: |
| | (SEQ | 2 omicron | 76 | 77 | 78 | 79 |
| | ID | BA1 spike | | | | |
| | NOs: | protein | | | | |
| | 13 & | optimized | | | | |
| | 14) | by | | | | |
| | | CR6 (SEQ | | | | |
| | | ID NO: 36) | | | | |
| LL44 | UTR7 | SARS-CoV- | SEQ ID NO: | SEQ ID NO: | SEQ ID NO: | SEQ ID NO: |
| | (SEQ | 2 omicron | 80 | 81 | 82 | 83 |
| | ID | BA1 spike | | | | |
| | NOs: | protein | | | | |
| | 13 & | optimized | | | | |
| | 14) | by | | | | |
| | | CR7 (SEQ | | | | |
| | | ID NO: 37) | | | | |
| LL59 | UTR4 | SARS-CoV- | SEQ ID NO: | SEQ ID NO: | SEQ ID NO: | SEQ ID NO: |
| (a.k.a. | (SEQ | 2 omicron | 84 | 85 | 86 | 87 |
| KM70 | ID | BA5 spike | | | | |
| Prime) | NOs: | protein | | | | |
| | 7 & 8) | optimized | | | | |
| | | by | | | | |
| | | CR2 (SEQ | | | | |
| | | ID NO: 38) | | | | |
| LL60 | UTR4 | SARS-CoV- | SEQ ID NO: | SEQ ID NO: | SEQ ID NO: | SEQ ID NO: |
| | (SEQ | 2 omicron | 88 | 89 | 90 | 91 |
| | ID | BA5 spike | | | | |
| | NOs: | protein | | | | |
| | 7 & 8) | optimized | | | | |
| | | by | | | | |
| | | CR3 (SEQ | | | | |
| | | ID NO: 39) | | | | |
| LL61 | UTR4 | SARS-CoV- | SEQ ID NO: | SEQ ID NO: | SEQ ID NO: | SEQ ID NO: |
| | (SEQ | 2 omicron | 92 | 93 | 94 | 95 |
| | ID | BA5 spike | | | | |
| | NOs: | protein | | | | |
| | 7 & 8) | optimized | | | | |
| | | by | | | | |
| | | CR4 (SEQ | | | | |
| | | ID NO: 40) | | | | |
| LL62 | UTR4 | SARS-CoV- | SEQ ID NO: | SEQ ID NO: | SEQ ID NO: | SEQ ID NO: |
| | (SEQ | 2 omicron | 96 | 97 | 98 | 99 |
| | ID | BA5 spike | | | | |
| | | protein | | | | |
| | NOs: | optimized | | | | |
| | 7 & 8) | by | | | | |
| | | CR5 (SEQ | | | | |
| | | ID NO: 41) | | | | |
| LL66 | UTR4 | SARS-CoV- | SEQ ID NO: | SEQ ID NO: | SEQ ID NO: | SEQ ID NO: |
| | (SEQ | 2 omicron | 100 | 101 | 102 | 103 |
| | ID | BA5 spike | | | | |
| | NOs: | protein | | | | |
| | 7 & 8) | optimized | | | | |
| | | by | | | | |
| | | CR6 (SEQ | | | | |
| | | ID NO: 42) | | | | |
| LL67 | UTR4 | SARS-CoV- | SEQ ID NO: | SEQ ID NO: | SEQ ID NO: | SEQ ID NO: |
| | (SEQ | 2 omicron | 104 | 105 | 106 | 107 |
| | ID | BA5 spike | | | | |
| | NOs: | protein | | | | |
| | 7 & 8) | optimized | | | | |
| | | by | | | | |
| | | CR7 (SEQ | | | | |
| | | ID NO: 43) | | | | |

### Cell Culture and mRNA Transfection Conditions

[0747] Baby hamster kidney (BHK) cells and human embryonic kidney 293 (HEK293) cells were maintained by routine passaging in growth media (Dulbecco's Modified Eagle Medium (DMEM, Lonza 12-614F) supplemented with 10 v/v % fetal bovine serum (FBS) (Corning 35-016-CV), antibiotic (Gibco 15140-122) and 0.1% v/v 0.1 M glutamine (Gibco 25030-081)) and grown at 37° C. and 5% CO₂.

[0748] BHK and HEK293 cells were seeded in growth media at 5×10⁵ cells/mL onto either 24-well tissue culture plates (Costar 3524) or collagen coated (2.5 mg/well, Gibco A10483-01) 96-well, clear-bottom, black-walled imaging microwell plates (Corning 3904). The following day, target mRNAs are complexed with TransiT mRNA transfection reagent (Mirus mir2250) in OptiMEM (Gibco 31985-070). Each target mRNA is forward transfected into HEK293 monolayers using 0.327% transfection reagent (final concentration) with mRNAs diluted in a 2x serial dilution ranging from 0.909 ng/mL to 0.114 ng/mL (final concentration), or water-only negative control. The transfected HEK293 cells are incubated overnight at standard tissue culture conditions.

### Fluorescence-Activated Cell Sorting of Luciferase Positive Cells

[0749] Cells treated with RNA encoding nanoluciferase and under the control of UTRs were removed from the plate using 0.01% trypsin for less than 1 minute and then fluorescence-activated cell sorted (FACS). The following UTRs were used: beta-actin gene (ACTB, SEQ ID NOs: 15 & 16), albumin gene (ALB or UTR1, SEQ ID NOs: 1 & 2), adenosine triphosphate (ATP) synthase beta subunit gene (ATPSB or UTR2, SEQ ID NOs: 3 & 4), fibroblast activation protein messenger ribonucleic acid (mRNA) (FAP or UTR 3, SEQ ID NOs: 5 & 6), H4 clustered histone 15 mRNA (HIST2H4A or UTR4, SEQ ID NOs: 7 & 8), glyceraldehyde-3-phosphate dehydrogenase gene (GAPDH or UTR5, SEQ ID NOs: 9 & 10), heat shock protein family A (Hsp70) member 8 gene (HSPA8 or UTR6, SEQ ID NOs: 11 & 12), interleukin-2 gene (IL-2 or UTR7, SEQ ID NOs: 13 & 14), transferrin gene (TF, SEQ ID NOs: 17 & 18), and eukaryotic translation elongation factor 2 (EEF2) mRNA (SEQ ID NOs: 19 & 20). Whether the RNA comprised modified nucleotides or cap-1 capping are provided in the examples below.

### For Whole-Cell and Surface SARS-CoV-2 Spike Protein Expression Assay

[0750] All recombinant RNA molecules were produced by in vitro transcription using N1-methyl pseudouridine to replace all uridines. All recombinant RNA molecules comprised a cap-1 5′ cap and a 3′ poly(A) tail. The mRNAs were purified and evaluated for mRNA integrity (by capillary gel electrophoresis), double stranded RNA (dsRNA) content (by Homogeneous Time Resolved Fluorescence [HTRF]), poly-A tail length, and percent capping. The specific RNA designs (i.e. KM71 RNA) are provided in the examples below.

[0751] Approximately, 18 hours post-transfection the cell media was removed from cells in 96-well format and cell monolayers were rinsed once with phosphate buffered saline (PBS) with calcium and magnesium (ThermoFisher Scientific #14080055). The cell monolayers were fixed in 4% paraformaldehyde (ThermoFisher Scientific J19943-K2), followed by rinsing twice with PBS (VWR #02-0119-1000).

[0752] For the whole-cell SARS-CoV-2 spike protein expression assay, fixed HEK293 cell monolayers in one set of 96 well plates were permeabilized with 0.5% Triton-X-100 (Ricca Chemical Co. 8698.5-16) in PBS for 15 min. Cell monolayers were rinsed 3 times with PBS-0.1% Tween20 (Sigma p7949-500 mL). Nonspecific antibody-binding was blocked using 1% horse serum (Gibco 16050-130) in PBS-0.1% Tween20 (blocking solution). SARS-CoV-2 spike protein was labeled by incubating cell monolayers with human anti-SARS-CoV-2 spike protein primary antibody (S309: Lot #N77817-1, Carrie Saucedo 27aug.2020) diluted 1:1500 in blocking solution. Then, cell monolayers were rinsed 3 times with PBS-0.1% Tween20. Indirect immunofluorescent detection of SARS-CoV-2 spike protein expression assay was completed by incubating cell monolayers with goat anti-human antibody with Alexa647 (ThermoFisher Scientific A-21445) diluted 1:2000 in blocking solution. Additionally, cell nuclei were co-labeled with DyeCycle Violet (ThermoFisher Scientific V35003), following manufacturer's recommendations. Cell monolayers were rinsed 3 times with PBS-0.1% tween then cells were stored in PBS for imaging.

[0753] SARS-CoV-2 spike protein expression was evaluated at the cell membrane surface for a separate set of 96 well plates. Nonspecific antibody-binding for fixed cell monolayers was blocked using 0.1% bovine serum albumin (BSA) (AlfaAesar J64655) in PBS (0.1% BSA-PBS). SARS-CoV-2 spike protein was labeled by incubating cell monolayers with human anti-SARS-CoV-2 spike protein primary antibody (S309) diluted 1:1500 in 0.1% BSA-PBS. Then, cell monolayers were rinsed 3 times with 0.1% BSA-PBS. Indirect immunofluorescent detection of SARS-CoV-2 spike protein was completed by incubating cell monolayers with goat anti-human antibody with Alexa647 diluted 1:2000 in 0.1% BSA-PBS. Additionally, cell nuclei were co-labeled with DyeCycle Violet, following manufacturer's recommendations. Cell monolayers were rinsed 3 times with 0.1% BSA-PBS then cells were stored in PBS for imaging.

[0754] Six fields per well were imaged using the 10× objective on the ThermoFishe rScientific Cell Insight CX7 automated imaging system in the DyeCycle Violet and Alexa647 fluorescent channels. Image analysis was completed using the Target Activation protocol associated with the Cellomics (HCS Navigator Ver 6.6.2 Build 8533) image analysis system. Data analysis was completed using Microsoft Excel and Prism Graphpad.

### For SARS2 Spike-ACE2 Binding and Detection Assay

[0755] Approximately, 18 hours post transfection the HEK293 cell suspension was created from transfected cell monolayers in 24-well format by rinsing once with PBS (VWR #02-0119-1000) followed by incubating cells in cell dissociation buffer (Gibco 13151-014) while moderately tritrating cells until many cells were observed as singlets.

[0756] The live, HEK293 cell-suspension was equilibrated in ice-cold PBS-2.5% FBS (rinse buffer). Cell-surface SARS-CoV-2 spike protein was bound to angiotensin-converting enzyme 2 (ACE2) soluble protein by bathing cells in ice-cold rinse buffer with 1:150 dilution of ACE2 (Acro Biosystems AC2-H82E6) followed by one rinse in ice-cold rinse buffer. The bound ACE2 soluble protein was labeled using the primary anti-ACE2 (R&D Systems AF933) antibody diluted 1:200 in ice cold rinse buffer. The cell suspension was rinsed once in ice-cold rinse buffer. Following primary antibody, cell suspensions were incubated with secondary anti-goat Alexa488 antibody (Invitrogen A11055) at a 1:1000 dilution in ice cold rinse buffer. The cell suspension was rinsed once in rinse buffer. Next, cell suspension was equilibrated in QSOL (Sartorius 91304) and the cells were analyzed using the Sartorius iQ3 flow cytometer and associated ForeCyte software. Data analysis was completed using Microsoft Excel and Prism Graphpad.

### Total In Vivo SARS-CoV-2 Spike Protein-Specific Antibody Titers

[0757] A multiplex assay was performed to evaluate SARS-Cov2 spike-specific antibodies in the serum of the immunized mice. LUMINEX™ microspheres (MAGPLEX™ microspheres, LUMINEX™ Corp from Austin, TX) were coupled with SARS-Cov2 spike antigen (lot: N79663) at 10 μg/mL reaction by chemical coupling according to manufacturer instructions. In 96 well plates, about 1000 microspheres/well were added in a volume of 50 μL phosphate-buffered saline (PBS) with 1% bovine serum albumin (BSA)+0.05% sodium azide (assay buffer) into five-fold serial dilutions of mouse serum. The microspheres and serum were incubated on an orbital shaker (covered) for 60 minutes at room temperature. The microspheres were washed one time three times with 200 μL per well of PBS with 0.05% Tween-20 (wash buffer) on a plate washer using a magnet to allow settling of beads between washes. Following the wash, 50 μL per well of r-Phycoerythrin (r-PE) conjugated anti-mouse immunoglobulin G (IgG) (Jackson Immunoresearch) was added at a 1:50 dilution, and plates were incubated (covered) on an orbital shaker at room temperature for 60 minutes. The plates were washed with the methods described above and incubated with PBS (covered) at room temperature on an orbital shaker for 20 minutes. Fluorescent intensity was measured using a Luminex INTELLIFLEX™ FLEXMAP 3D™ (Life Technologies model INTELLIFLEX FM3D000). The raw data was analyzed using a Softmax Pro template, where the serum sample binding potency was interpolated based on a five-parameter logistic fit of the standard curve. Serum anti-SARS-CoV2 spike potency was calculated in terms of Assay Units (AU) using a reference standard. In brief, a cocktail of monoclonal antibodies (mAb) specific for SARS-CoV-2 spike were prepared (1A9 Genetex #75870-168, mCR 3022 Absolute Antibody #AB1680-3.0, and MP 0142 MP Biologicals #8720412) at an optimized dilution (1:17.36 for 1A9, 1:11.6 for mCR 3022, and 1:9.63 for MP 0142). The readout from this mAb cocktail was assigned a concentration of 100 AU for standard normalization purposes.

### Anti-SARS-CoV-2 Neutralization Antibody Titers

[0758] Serum samples were analyzed using a validated pseudovirion neutralization assay (PNA) against the Wuhan (WT), Delta, or Omicron variants. On day 1 of the neutralization assay (which is discrete from the days of in vivo treatments), Vero E6 cells expressing the ACE-2 receptor were seeded in 96-well white plates at 20,000 cells/well to reach a cell confluence of 80% next day. On day 2, serum samples and controls were serially diluted. In parallel, SARS-CoV-2 pseudovirus was diluted to reach the desired concentration (according to pre-determined TU/mL). Pseudovirus was added to diluted serum samples and pre-incubated for 1 hour at 37° C. with 5% CO2. The mixture was added to the pre-seeded Vero E6 cell layers and plates were incubated for 18-22 hours at 37° C. with 5% CO2. On day 3, following incubation and removal of media, One-Glo EX luciferase assay substrate was added to cells and incubated for 3 minutes at RT with shaking. Luminescence of the luciferase was measured using a SPECTRAMAX™ iD3 microplate reader and SoftMax Pro v7.0.1. Luminescence results for each dilution were used to generate a titration curve using a 4-parameter logistic regression (4PL). The titers were defined as the reciprocal dilution of the sample for which the luminescence is equal to a pre-determined cut-point of 50, corresponding to 50% neutralization. This cut-point was established using linear regression using 50% flanking points. Samples were analyzed using an array of acceptance criteria and were repeated if an acceptance criterion is not met.

### Live Virus Antibody Neutralization Titers

[0759] A Microneutralization (MN) assay was used for serological detection of SARS-CoV-2 specific neutralizing antibodies in mouse serum samples, against SARS-CoV-2 Omicron variant (SARS-CoV-2 ß.1.1.529 Omicron) (Refer to the link to “ANALYTICAL STUDY REPORT FOR MICRONEUTRALIZATION CPE-BASED ASSAY FOR SARS-COV-2 FOR GSK PROTOCOL NUMBER AP33647/ELN44471/B-000-G5Q” in Annexes, or to the raw data, Table 27, in the Annexes.) Vismederi, Siena, Italy.

### Intracellular Cytokine Staining by Flow Cytometry

[0760] Multi-parameter flow-cytometry with intracellular cytokine staining (ICS) was used to assess SARS-CoV-2 Spike-specific CD4 and CD8 T cell responses. Spleens were harvested on day 35 from 5 mice per group. Splenocytes from individual mice were plated in round-bottom 96 well tissue culture plates at 1.5×10⁶ viable cells/well and stimulated with one of the following pools of spike peptides (from JPT Peptide Technologies Gmbh, Berlin, Germany or Genscript):

| | No. | | Vendor | |
|---|---|---|---|---|
| | Peptides | Stimulation | (Catalog | Lot |
| Stimulation | in Pool | Concentration | Number) | No. |
| Media | N/A | N/A | N/A | N/A |
| Spike Peptide | 158 | 1.0 μg/mL | JPT Peptide | 47886VSi-01 |
| Pool 1 70% | | | Technologies | |
| Purity | | | Gmbh (PM-WCPV- | |
| | | | S-2, vial 1) | |
| Spike Peptide | 157 | 1.0 μg/mL | JPT Peptide | 47886VSi-02 |
| Pool 2 70% | | | Technologies | |
| Purity | | | Gmbh (PM-WCPV- | |
| | | | S-2, vial 2) | |
| Spike full | 6 | 1.0 μg/mL | Genscript | U260NFE270 |
| length gap | | | | |
| peptides | | | | |
| Spike Ecto gap | 8 | 1.0 μg/mL | Genscript | U260NFE270 |
| peptides | | | | |

[0761] All samples were co-stimulated with the anti-CD28 clone 37.51 monoclonal antibody (mAb, ThermoFisher, Catalog No. 14-0281-82) and stained for the degranulation marker CD107α, 12-14 hours, in culture (37° C., 5% CO2) for 12-14 hours, thereby performing a stimulatory incubation. Two hours into the stimulatory incubation, BD GOLGIPLUG™, a protein transport inhibitor containing Brefeldin A, was added to all samples to block cytokine secretion from the cell. Upon completion of the stimulatory incubation, all samples were stained for: 1) viability, 2) phenotypic markers a) CD3, b) CD4, c) CD8, and d) CD44, and 3) cytokines a) IFN-γ, b) IL-2, c) TNF-α, d) IL-17F, and e) IL-4/IL-13. The data was acquired on the BD FAC SYMPHONY™ A5 special order research product cell analyzer using the High Throughput Sampler (HTS) option for acquisition in a 96 well plate format. Prior to analysis, the raw .fcs data files were analyzed by the computational algorithm Flow AI, which is a quality control process that identifies and removes aberrant events caused by anomalies in fluorescence signal across all acquired parameters or flow rate over time of data acquisition. The flow cytometry data analysis was performed using FLOWJO™ Vi0.8.0. FIG. 53 illustrates the gating strategy used to identify activated CD4 and CD8 T cells. First, gates were defined that identified cytokine and CD107a expressing positive populations within the viable, activated, CD4 and CD8 T cell populations. Next, the Boolean combination gate tool was used to automatically generate all possible combinations (positive and negative) of cytokine and CD107a expressing cells. For activated CD4 and CD8 T cells, all six analytes were included in the Boolean analysis generating a total of 64 multi-functional subsets. The raw data was exported into Microsoft Excel for further analysis. The response to peptide pool stimulation was determined by subtracting the response in the unstimulated media control for each sample. Negative values resulting from this subtraction were identified and valued as null (“zero”). The multi-functional subsets were used to categorize the data into CD4 T helper (Th) and CD8 T cytotoxic (Tc) phenotypic subsets based on production of IFN-γ, IL-13/IL-4, and IL-17F cytokines, and these subsets are defined in Table 4.

TABLE 4

| Phenotype | IFN-γ | IL-13/IL-4 | IL-17F | IL-2 | TNF-α | CD107a |
|---|---|---|---|---|---|---|
| Tₕ/T_{c}0 | − | − | − | +/− | +/− | +/− |
| Tₕ/T_{c}1 | + | − | − | +/− | +/− | +/− |
| Tₕ/T_{c}2 | − | + | − | +/− | +/− | +/− |
| Tₕ/T_{c}17 | − | − | + | +/− | +/− | +/− |

[0762] All graphs of the intracellular cytokine staining by flow cytometry were generated with GraphPad Prism v8.0.0.

### Tfh Staining by Flow Cytometry

[0763] Spleens were collected from 5 mice per group at day 35. Splenocytes from individual mice were plated in round-bottom 96 well tissue culture plates at 1.5×10⁶ viable cells per well. Cells were stained with 1:1000 near IR Live/Dead stain (Invitrogen) for 20 min at room temperature and then treated with 1:15 diluted Fc block (BD Biosciences) in fluorescence-activated single cell sorting (FACS) wash buffer (PBS plus 1 volume % Fetal Bovine Serum, Thermo Scientific) for 10 min at 4° C. to avoid non-specific binding. Cells were then stained with the following extracellular markers: CD19-BV510, CD62L-BB515, CD127-BUV737, CXCR5-PECy7, PD-1-APC, CXCR3-BB700, CCR6-BV605, and ICOS—BV421, in Brilliant Stain Buffer (BSB) and FACS Wash Buffer. Cells were incubated for 20 minutes in the dark and fixed and permeabilized using BD cytofix/cytoperm solution for 20 minutes at 4° C. in the dark. After incubation, the cells were treated with 1:15 dilution of Fc Block for 10 min, and then stained with an intracellular antibody mix: CD3-BV711, CD4-BUV395, CD8-BUV805, CD44-BV786, and Bcl6-PE-CF594 in BSB in FACS Perm/Wash Buffer (10× BD Perm/Wash diluted to 1× in Ultra Pure Distilled Water) for 30 minutes at room temperature (in the dark). The cells were subsequently washed then resuspended in FACS Wash Buffer and acquired on the BD FACSYMPHONY™ A5 special order research product cell analyzer. Data was analyzed using FlowJo v10.8.0. Tfh cells were identified according to the gating strategy in FIG. 54.

### Example 1

[0764] Baby hamster kidney cells were transfected with RNA encoding firefly luciferase under the control of the following human UTRs: beta-actin gene (ACTB, Accession NO: NM_001101.5; SEQ ID NOs: 15 & 16, complete mRNA in vitro transcribed from SEQ ID NO: 111), albumin gene (ALB or UTR1, Accession NOs: NG_056261.1 & NM_000477.7; SEQ ID NOs: 1 & 2, complete mRNA in vitro transcribed from SEQ ID NO: 104), adenosine triphosphate (ATP) synthase beta subunit gene (ATPSB or UTR2, Accession NOs: AH002618.2 & NM_001686.4; SEQ ID NOs: 3 & 4, complete mRNA in vitro transcribed from SEQ ID NO: 105), fibroblast activation protein messenger ribonucleic acid (mRNA) (FAP or UTR 3, SEQ ID NOs: 5 & 6, Accession NOs: U09278.2 & NM_001291807.3, complete mRNA in vitro transcribed from SEQ ID NO: 106), H4 clustered histone 15 mRNA (HIST2H4A or UTR4, SEQ ID NOs: 7 & 8; Accession NO: NR_168448.1, complete mRNA in vitro transcribed from SEQ ID NO: 107), glyceraldehyde-3-phosphate dehydrogenase gene (GAPDH or UTR5, Accession NOs: NG_007073.2 & NR_152150.2; SEQ ID NOs: 9 & 10, complete mRNA in vitro transcribed from SEQ ID NO: 108), heat shock protein family A (Hsp70) member 8 gene (HSPA8 or UTR6, Accession NOs: NG_029473.1 & NM_153201.4; SEQ ID NOs: 11 & 12, complete mRNA in vitro transcribed from SEQ ID NO: 109), interleukin-2 gene (IL-2 or UTR7; Accession NOs: AH002842.2 & NM_000586.4;; SEQ ID NOs: 13 & 14, complete mRNA in vitro transcribed from SEQ ID NO: 110), and transferrin gene (TF, Accession NO: NG_013080.2; SEQ ID NOs: 17 & 18, complete mRNA in vitro transcribed from SEQ ID NO: 112), with untransfected mouse thymus cells and BHK cells as controls. Baby hamster kidney cells lack an innate immune response and thereby demonstrate gene expression from the UTR without inhibitory influence from the innate immune response. As shown in FIGS. 1-3, UTRs 3 and 4 stimulate firefly luciferase expression as well as ACTB UTR does when an innate immune response is not present. Beta actin is expressed ubiquitously in cells. Firefly luciferase fluorescence was detected 18 hours after transfection. The mRNA had cap-0 capping and uridines, but no N1-methylpseudouridines.

### Example 2

[0765] Human embryonic kidney 293 cells were transfected with RNA encoding firefly luciferase under the control of the following human UTRs: ACTB, UTRs1-7, TF, and eukaryotic translation elongation factor 2 (EEF2) mRNA (Accession NO: NM_001961.4; SEQ ID NOs: 19 & 20, complete mRNA in vitro transcribed from SEQ ID NO: 113). Firefly luciferase fluorescence was detected 18 hours after transfected. The mRNA had cap-0 capping and uridines, but no N1-methylpseudouridines. As shown in FIGS. 4-6, UTRs 2-6 outperformed ACTB UTRs in triggering more cells to express firefly luciferase.

### Example 3

[0766] Human embryonic kidney 293 cells were transfected with RNA encoding firefly luciferase under the control of the following human UTRs: ACTB, UTRs1-7, TF, and eukaryotic translation elongation factor 2 (EEF2) mRNA. Firefly luciferase fluorescence was detected 18 hours after transfection. The mRNA had cap-1 capping and N1-methylpseudouridines, but no uridines. As shown in FIG. 7, UTRs 1, 2, 3, 4, 6, and 7 outperformed ACTB UTRs in triggering more cells to express firefly luciferase. As shown in FIGS. 8 and 9, at least cells treated with mRNA comprising UTRs 1, 2, 3, 4, 6, and 7 expressed more firefly luciferase than those cells treated with mRNA comprising ACTB UTRs. Cells treated with mRNA comprising UTR 5 and EEF UTRs had expression that was equal to or greater than that of cells treated with mRNA comprising ACTB UTRs.

### Example 4A

[0767] HEK293 cells were transfected with 12.5 ng, 25 ng, 50 ng, and 100 ng of KM72 (SEQ ID NO: 64), KM64 (SEQ ID NO: 42), KM65 (SEQ ID NO: 44), KM61 (SEQ ID NO: 34), KM62 (SEQ ID NO: 37), or KM63 (SEQ ID NO: 40) RNA and were assessed for surface and whole cell SARS-CoV-2 omicron spike protein as described above. FIGS. 10 and 11 depict the dose response curve and area under the curve, respectively, of expression of spike protein from SARS-CoV-2 omicron strain on the cells' surface. FIGS. 12 and 13 show the dose response curve and area under the curve, respectively, of expression of whole cell spike protein. Three prime and 5′ UTRs 4 and 7 (in KM62 and KM63 respectively) drove cell membrane surface expression of SARS CoV-2 omicron spike protein as well as UTRs from CureVac's second SARS-CoV-2 candidate (KM72, SEQ ID NOs: 27 and 28), BioNTech's BNT162b2 SARS-CoV-2 FDA-approved product (Accession NOs: NM_000558, OL521838, NM_001130, SEQ ID NOs: 19 and 20, in KM64), and Moderna's mRNA-1273 SARS-CoV-2 FDA-approved product (SEQ ID NOs: 23 and 24, in KM65). The SARS-COV-2 omicron spike protein mRNA sequences were the same across constructs and were designed using commercially available software that optimized only for a codon adaptation index of greater than or equal to 0.7.

### Example 4B

[0768] HEK293 cells were transfected with 12.5 ng, 25 ng, 50 ng, and 100 ng of KM62 (SEQ ID NO: 37), KM63 (SEQ ID NO: 40), KM67 (SEQ ID NO: 50), KM68 (SEQ ID NO: 53), KM69 (SEQ ID NO: 56), KM70 (SEQ ID NO: 59), KM71 (SEQ ID NO: 62), or KM96 (SEQ ID NO: 94) RNA per well and were assessed for surface and whole cell SARS-CoV-2 omicron spike protein as described above. The SARS-COV-2 omicron spike protein mRNA sequences were the same across constructs and were designed using the CR2 algorithm.

[0769] FIGS. 14 and 15 depict the dose response curve and area under the curve, respectively, of expression of spike protein from SARS-CoV-2 omicron strain on the cells' surface with KM69, KM70, KM71, or KM96 RNA transfection. FIGS. 16 and 17 show the dose response curve and area under the curve, respectively, of expression of whole cell spike protein with KM69, KM70, KM71, or KM96 transfection. Three prime and 5′ UTR 4 (KM70) and 3′ and 5′ UTR 7 (KM71) drove cell membrane surface expression of SARS CoV-2 omicron spike protein as well as a UTR from BioNTech's BNT162b2 SARS-CoV-2 FDA-approved product (Accession NOs: NM_000558, OL521838, NM_001130, SEQ ID NOs: 19 and 20, in KM96).

[0770] FIGS. 18 and 19 depict the dose response curve and area under the curve, respectively, of expression of spike protein from SARS-CoV-2 omicron strain on the cells' membranes with KM62, KM67, or KM70 RNA transfection the cell membrane surface of HEK293 cells. KM62, KM67, and KM70 comprise 5′ and 3′ UTR4. Design with the CR1 (KM67) and CR2 (KM70) algorithms resulted in significantly more surface expression of SARS-CoV-2 omicron strain than achieved with CAI 0.7 (KM62), a commercially available software that optimized only for a codon adaptation index of greater than or equal to 0.7. FIGS. 20 and 21 show the dose response curve and area under the curve, respectively, of expression of whole cell spike protein from the same treatments as in FIGS. 18 and 19.

[0771] FIGS. 22 and 23 depict the dose response curve and area under the curve, respectively, of expression of spike protein from SARS-CoV-2 omicron strain on the cell membrane surface of HEK293 cells with KM63, KM68, and KM71 RNA transfection. KM63, KM68, and KM71 comprise 5′ and 3′ UTR7. Design with the CR1 (KM68) and CR2 (KM71) algorithms resulted in significantly more surface expression of SARS-CoV-2 omicron strain than achieved with CAI 0.7 (KM63), a commercially available software that optimized only for a codon adaptation index of greater than or equal to 0.7. FIGS. 24 and 25 show the dose response curve and area under the curve, respectively, of expression of whole cell spike protein from the same treatments as in FIGS. 22 and 23.

### Example 5

[0772] HEK293 cells were transfected with 12.5 ng, 25 ng, 50 ng, and 100 ng of VAC3, KM87, KM88, KM89, JW48, KM71, KM68, KM70, KM62, KM65, KM63, KM66, or KM61 RNA per well. The mRNA sequences for KM87, KM88, and KM89 that encoded SARS-CoV-2 Wuhan spike protein were the same and were designed using commercially available software that optimized only for a codon adaptation index of greater than or equal to 0.7. The mRNA sequence for JW48 that encoded SARS-CoV-2 Wuhan spike protein (SEQ ID NO: 118) was designed using IDT's online codon optimization tool. The mRNA sequences for VAC3 that encoded SARS-CoV-2 Wuhan spike protein were obtained from positions 17-3838 of the sequence in The World Health Organization: International Nonproprietary Names Programme. Messenger RNA Encoding the Full-Length SARS-CoV-2 Spike Glycoprotein; p. 11868, which is further described in Edo Kon, Uri Elia, and Dann Peer, “Principles for designing an optimal mRNA lipid nanoparticle vaccine,” Curr. Opin. Biotechnol. 2022, 73:329-336.

[0773] Eighteen hours later they were assessed for SARS-CoV-2 Wuhan strain expression on the cells' surface and the entirety of the cells as described above. FIGS. 26 and 27 show the dose response curve of spike protein from SARS-CoV-2 Wuhan strain expressed from VAC3, KM87, KM88, KM89, JW48 on the cell membrane surface of HEK293 cells and on the whole cells, respectively. Three prime and 5′ UTRs 4 and 7 (in KM88 and KM89 respectively) drove cell membrane surface expression and whole cell expression of SARS CoV-2 Wuhan spike protein as well as UTRs from CureVac's second SARS-CoV-2 candidate (in VAC3) and Moderna's mRNA-1273 SARS-CoV-2 FDA-approved product (in JW48).

[0774] FIGS. 29 and 30 show the dose response curve of spike protein from SARS-CoV-2 omicron strain encoded by 12.5 ng, 25 ng, 50 ng, and 100 ng of KM71, KM68, KM70, KM62, KM65, KM63, KM66, or KM61 RNA per well on the cell membrane surface and the whole cell, respectively, of HEK293 cells. Encoding with CR1 (in KM68) and CR2 (in KM70 and 71) with 3′ and 5′ UTR4 (in KM70) and 3′ and 5′ UTR7 (in KM71 and KM68) drove significantly more cell membrane surface expression and whole cell expression of SARS CoV-2 omicron spike protein cell when compared to when the expression was driven by omicron spike protein sequences that were designed using commercially available software that optimized only for a codon adaptation index of greater than or equal to 0.7 and where the expression was driven by UTR3, UTR4, UTR7, and Moderna UTRs in mRNA-1273 SARS-CoV-2 FDA-approved product (in KM61, KM62, KM63, and KM65 respectively).

### Example 6

[0775] HEK293 cells were administered 62.5 ng, 125 ng, 250 ng, and 500 ng of VAC3, KM87, KM88, KM89, JW48, KM71, KM68, KM70, KM62, KM65, KM63, KM66, or KM61 RNA per well and were assessed for angiotensin-converting enzyme 2 (ACE2) protein binding with the SARS-CoV-2 Wuhan spike protein released from the transfected cells, as described above.

[0776] FIG. 28 depicts the dose response curve of ACE2 binding after VAC3, KM87, KM88, KM89, or JW48 RNA transfection. Three prime and 5′ UTRs 4 and 7 (in KM88 and KM89 respectively) drove Wuhan spike protein expression as well as UTRs from CureVac's second SARS-CoV-2 candidate (in VAC3) and Moderna's mRNA-1273 SARS-CoV-2 FDA-approved product (in JW48).

[0777] FIG. 31 depicts the dose response curve of angiotensin-converting enzyme 2 (ACE2) protein binding with SARS-CoV-2 Wuhan spike protein after transfection with KM71, KM68, KM70, KM62, KM65, KM63, KM66, or KM61 RNA. Encoding with CR1 (in KM68) and CR2 (in KM70 and 71) with 3′ and 5′ UTR4 (in KM70) and UTR7 (in KM71 and KM68) drove significantly more omicron spike protein expression as measured by ACE2 binding when compared to when the expression was driven by omicron spike protein sequences that were designed using commercially available software that optimized only for a codon adaptation index of greater than or equal to 0.7 and where the expression was driven by UTR3, UTR4, UTR7, and Moderna UTRs in mRNA-1273 SARS-CoV-2 FDA-approved product (in KM61, KM62, KM63, and KM65 respectively).

### Example 7: In Vivo Mouse Studies

[0778] All recombinant RNA molecules were produced by in vitro transcription using N1-methyl pseudouridine to replace all uridines. All recombinant RNA molecules comprised a cap-1 5′ cap and a 3′ poly(A) tail. The mRNAs were purified and evaluated for mRNA integrity (by capillary gel electrophoresis), double stranded RNA (dsRNA) content (by Homogeneous Time Resolved Fluorescence [HTRF]), poly-A tail length, and percent capping.

[0779] The mRNA constructs were then formulated in LNPs comprising 46.3 mol % cation-ionizable lipid, RV39; 1.6 mol % PEG-conjugated lipid; 42.7 mol % cholesterol; and 9.4 mol % 1,2-diastearoyl-sn-glycero-3-phosphocholine (DSPC).

[0780] Female BALB/c mice were 7 or 8 weeks old at day 0 of the study. On day 0 and day 21 of the study were injected with a 28 gauge needle into both hindleg thigh muscles with a vehicle or a unit dose per animal of 5.0 μg, 1.0 μg, or 0.2 μg of KM65, KM70, KM71, or KM68 in 50 μL (25 μL per thigh muscle). The groups of animals, the lots of formulations, stock concentrations of formulations, vials of formulations, and storage temperatures of formulations were:

| | | Test | | | | | Storage |
|---|---|---|---|---|---|---|---|
| | | Article | Lot | Stock | Number of | Number of | Temperature |
| Group | Immunogen | Label | Number | Concentration | vials supplied | animals | (° C.) |
| 1 | Saline | NA | NA | As | NA | 4 | RT |
| | | | | Supplied | | | |
| | | | | from | | | |
| | | | | Manufacturer | | | |
| 2 | Moderna | Moderna | 24805A | 100 μg/mL | 2 vials 5 ug | 8 | −80° C. |
| | UTRs- | control | | | dose (1 mL | | |
| | Omicron | KM65 | | | material per | | |
| | Control | LNPs | | | vial) | | |
| 3 | (KM65) | (RV39) | | | 2 vials 1 ug | 8 | |
| | | | | | dose (0.4 mL | | |
| | | | | | material per | | |
| | | | | | vial) | | |
| 4 | | | | | 2 vials 0.2 ug | 8 | |
| | | | | | dose (0.1 mL | | |
| | | | | | per vial) | | |
| 5 | KM70 | KM70 | 24805C | 100 μg/mL | 2 vials 5 ug | 8 | −80° C. |
| | | LNPs | | | dose (1 mL | | |
| | | (RV39) | | | material per | | |
| | | | | | vial) | | |
| 6 | | | | | 2 vials 1 ug | 8 | |
| | | | | | dose (0.4 mL | | |
| | | | | | material per | | |
| | | | | | vial) | | |
| 7 | | | | | 2 vials 0.2 ug | 8 | |
| | | | | | dose (0.1 mL | | |
| | | | | | per vial) | | |
| 8 | KM71 | KM71 | 24805D | 100 μg/mL | 2 vials 5 ug | 8 | −80° C. |
| | | LNPs | | | dose (1 mL | | |
| | | (RV39) | | | material per | | |
| | | | | | vial) | | |
| 9 | | | | | 2 vials 1 ug | 8* | |
| | | | | | dose (0.4 mL | | |
| | | | | | material per | | |
| | | | | | vial) | | |
| 10 | | | | | 2 vials 0.2 ug | 8 | |
| | | | | | dose (0.1 mL | | |
| | | | | | per vial) | | |
| 11 | KM68 | KM68 | 24805B | 100 μg/mL | 2 vials 5 ug | 8 | −80° C. |
| | | LNPs | | | dose (1 mL | | |
| | | (RV39) | | | material per | | |
| | | | | | vial) | | |
| 12 | | | | | 2 vials 1 ug | 8 | |
| | | | | | dose (0.4 mL | | |
| | | | | | material per | | |
| | | | | | vial) | | |
| 13 | | | | | 2 vials 0.2 ug | 8 | |
| | | | | | dose (0.1 mL | | |
| | | | | | per vial) | | |
| 14 | Moderna | LNP | FM-1991A | 500 μg/mL | 2 vials 5 ug | 8 | −80° C. |
| | UTRs- | KM65 | | | dose (0.3 mL | | |
| | Omicron | mRNA | | | material per | | |
| | Control | FM-1991A | | | vial) | | |
| 15 | (KM65) | | | | 2 vials 1 ug | 8 | |
| | | | | | dose (0.08 mL | | |
| | | | | | material per | | |
| | | | | | vial) | | |
| 16 | | | | | 2 vials 0.2 ug | 8 | |
| | | | | | dose (0.02 mL | | |
| | | | | | per vial) | | |

[0781] On day 14, 25 μL of whole blood, which is around 10 μL of serum, was obtained from the tail tip of each animal. On day 21, 100 μL of whole blood, which is around 40 μL of serum, was obtained retro-orbitally. On day 35, mice were anesthetized under isoflurane and terminally exsanguinated by cardiac stick to obtain from around 200 μL to around 500 μL of whole blood, which never resulted in less than 100 μL serum. *Due to an error in retro-orbital serum collection one animal was humanely killed in group 9 on day 21, and no serum was obtained for day 35 from that animal. On day 14, one animal from group 14 had its serum lost due to a centrifuge error during serum separation.

[0782] Anti-spike protein IgG binding antibody titers were determined by ELISA from day 14, 21, and 35 serum samples (see FIGS. 32 and 33). SARS-CoV-2 omicron pseudovirus neutralization antibody titers (NT 50) were obtained from day 21 and 35 serum samples (see FIGS. 34 and 35). SARS-CoV-2 delta pseudovirus neutralization antibody titers (NT 50) were obtained from day 35 serum samples (see FIGS. 36 and 37). Live SARS-CoV-2 omicron neutralization antibody titers (NT 50) were obtained from day 35 serum samples (see FIGS. 38 and 39). The KM70, KM71, and KM68 mRNA constructs were immunogenic compared to the saline control. Administration of the KM70, KM71, and KM68 mRNA constructs induced a response that was not below the response after KM65 administration. All constructs were formulated in the RV39 at the majority of the dosages and timepoints (excluding the 5.0 μg dosage at Day 35 for KM68 and KM70 when compared to the KM65 RV39 formulation. KM71 produced significantly higher titers (˜2-fold) at the 5.0 μg dosage (Post-2, Day 35) when compared to KM68 and KM70. At the 0.2 and 1.0 μg dosage Post-2, the mRNA constructs performed comparably. A dose response was observed across most constructs.

[0783] FIGS. 32, 33A, and 33B show the geometric mean IgG titers on day 14, day 21, and day 35 from female mice treated on day 0 and day 21 of the study with 5 μg, 1 μg, or 0.2 μg of KM65, KM70, or KM71 RNA encapsulated in RV39 LNPs. The individual points are the IgG titers from each individual animal. FIG. 32 organizes the geometric means by RNA treatment, then by dose, then by day of serum extraction for IgG titers. FIGS. 33A and 33B organizes the geometric means by day of serum extraction, then by dose, then by RNA treatment. Treatment with RNA encoded by CR2 optimization of SARS-CoV-2 omicron spike protein, which is driven by UTR4, elicited higher IgG titers at days 14 and 21 than treatment with KM65, RNA encoding SARS-CoV-2 omicron spike protein optimized by commercially available software that optimized only for a codon adaptation index of greater than or equal to 0.7 and which was driven by Moderna UTRs in mRNA-1273 SARS-CoV-2 FDA-approved product. Treatment with RNA encoded by CR2 optimization of SARS-CoV-2 omicron spike protein, which is driven by UTR7, elicited higher IgG titers at days 14 and 21 at 5 μg doses and at day 35 at 5 μg and 0.2 μg than treatment with KM65, RNA encoding SARS-CoV-2 omicron spike protein optimized by commercially available software that optimized only for a codon adaptation index of greater than or equal to 0.7 and which was driven by Moderna UTRs in mRNA-1273 SARS-CoV-2 FDA-approved product. Treatment with RNA encoded by CR1 optimization of SARS-CoV-2 omicron spike protein, which is driven by UTR7, elicited higher IgG titers at days 21 and 35 at 1 μg doses than treatment with KM65, RNA encoding SARS-CoV-2 omicron spike protein optimized by commercially available software that optimized only for a codon adaptation index of greater than or equal to 0.7 and which was driven by Moderna UTRs in mRNA-1273 SARS-CoV-2 FDA-approved product.

[0784] FIGS. 34, 35A, and 35B depict neutralizing antibody titers (NT50) against a pseudovirus comprising SARS-CoV-2 omicron spike protein on days 21 and 35 of the same animals treated in FIGS. 32 and 33. At day 21 and a dose of 0.2 μg, administration of KM70 elicited higher neutralizing antibody titers than administration of KM65, RNA encoding SARS-CoV-2 omicron spike protein optimized by commercially available software that optimized only for a codon adaptation index of greater than or equal to 0.7 and which was driven by Moderna UTRs in mRNA-1273 SARS-CoV-2 FDA-approved product. At day 23 and a dose of 1 μg, administration of KM71 or KM68 elicited higher neutralizing antibody titers than administration of KM65, RNA encoding SARS-CoV-2 omicron spike protein optimized by commercially available software that optimized only for a codon adaptation index of greater than or equal to 0.7 and which was driven by Moderna UTRs in mRNA-1273 SARS-CoV-2 FDA-approved product. At day 23 and a dose of 0.2 μg, administration of KM70, KM71, or KM68 elicited higher neutralizing antibody titers than administration of KM65, RNA encoding SARS-CoV-2 omicron spike protein optimized by commercially available software that optimized only for a codon adaptation index of greater than or equal to 0.7 and which was driven by Moderna UTRs in mRNA-1273 SARS-CoV-2 FDA-approved product.

[0785] FIGS. 36 and 37 show neutralizing antibody titers (NT50) against a pseudovirus comprising SARS-CoV-2 delta spike protein on day 35 of the same animals treated in FIGS. 32, 33A, and 33B. At every dose, administration with KM68, KM70, or KM71 elicited higher neutralizing antibody titers than administration of KM65, RNA encoding SARS-CoV-2 omicron spike protein optimized by commercially available software that optimized only for a codon adaptation index of greater than or equal to 0.7 and which was driven by Moderna UTRs in mRNA-1273 SARS-CoV-2 FDA-approved product.

[0786] FIGS. 38 and 39 depict neutralizing antibody titers (NT50) against live SARS-CoV-2 virus on day 35 of the same animals treated in FIGS. 32, 33A, and 33B. Administration of KM68, KM70, and KM71 elicited neutralizing antibodies (NT50) against live SARS-CoV-2 omicron virus at the same levels as those elicited by administration of KM65, RNA encoding SARS-CoV-2 omicron spike protein optimized by commercially available software that optimized only for a codon adaptation index of greater than or equal to 0.7 and which was driven by Moderna UTRs in mRNA-1273 SARS-CoV-2 FDA-approved product. At the lowest dose, 0.2 μg, UTRs 4 and 7 outperformed the Moderna UTRs. At the lowest dose, 0.2 μg, the code RNA 1 and 2 optimized SARS-CoV-2 omicron spike protein RNA sequences outperformed SARS-CoV-2 omicron spike protein RNA sequence that was optimized with the commercially available software.

### Example 8

[0787] KM70 RNA was synthesized with 3′ poly(A) tails consisting of 40 adenosine monophosphates (As), 60 As, 80 As, 100 As, 120 As, or 150 As, and 12.5 ng, 25 ng, 50 ng, or 100 ng of the RNA were transfected into HEK293 cells as described above. Eighteen hours after transfection, the HEK293 cells were assessed for SARS-CoV-2 omicron spike protein surface expression.

[0788] FIGS. 40 and 41 show the dose response curve and area under the curve, respectively, of the HEK293 cell membrane surface expression of SARS-CoV-2 omicron spike protein encoded by 12.5 ng, 25 ng, 50 ng, and 100 ng of KM70, where the length of the 3′ poly(A) tail consisted of 40 As, 60 As, 80 As, 100 As, 120 As, or 150 As.

[0789] KM70 RNA with a 3′ poly(A) tail consisting of 80 As had the highest overall expression of SARS-CoV-2 spike protein on the HEK293 cell membrane surface, followed by KM70 RNA with a 3′ poly(A) tail consisting of 100 As, then by KM70 RNA with a 3′ poly(A) tail consisting of 150 As, 120 As, or 60 As, then by KM70 RNA with a 3′ poly(A) tail consisting of 40 As. The lowest expression was observed with KM70 having no 3′ poly(A) tail (“polyA_0”) and with transfection with no RNA at all.

### Example 9

[0790] KM65, KM68, KM70, and KM71 RNA was synthesized with 3′ poly(A) tails consisting of around 70 adenosine monophosphates (As) or exactly 100 As, and 12.5 ng, 25 ng, 50 ng, or 100 ng of the RNA were transfected into HEK293 cells as described above.

[0791] FIGS. 42-45 depict the dose response curve of HEK293 cell membrane surface expression of SARS-CoV-2 omicron spike protein encoded by 12.5 ng, 25 ng, 50 ng, and 100 ng of KM65, KM68, KM70, and KM71 RNA, respectively, where the length of the 3′ poly(A) tail consisted of around 70 As (solid lines) or exactly 100 As (dotted lines).

[0792] Regardless of the construct, 3′ poly(A) tails consisting of around 70 As slightly outperformed 3′ poly(A) tails consisting of exactly 100 As. Together with Example 8, this suggests highest expression with a 3′ poly(A) tail consisting of from around 70 As to 80As when compared to the expression of a 3′ poly(A) tail consisting of exactly 100 As.

### Example 10a

[0793] KM70 (as described in U.S. Ser. No. 63/413,844) and LL34-38 (see above) RNA was synthesized with 3′ poly(A) tails consisting of, from 5′ to 3′, 30 adenosine monophosphates (As), a linker, and 38 As. All recombinant RNA molecules were produced by in vitro transcription using N1-methyl pseudouridine to replace all uridines. All recombinant RNA molecules comprised a cap-1 5′ cap and a 3′ poly(A) tail. The mRNAs were purified and evaluated for mRNA integrity (by capillary gel electrophoresis), double stranded RNA (dsRNA) content (by Homogeneous Time Resolved Fluorescence [HTRF]), poly-A tail length, and percent capping.

[0794] Each RNA encapsulated in then formulated in LNPs comprising 46.3 mol % cation-ionizable lipid, RV39; 1.6 mol % PEG-conjugated lipid; 42.7 mol % cholesterol; and 9.4 mol % 1,2-diastearoyl-sn-glycero-3-phosphocholine (DSPC), i.e., the RV39 formulation.

[0795] A potency assay of the LNP encapsulated RNAs was carried out. HEK 293 cells were seeded at 3×10⁴ cells/well in a 96-well plate and incubated overnight. The cells were transduced with Omicron RNA LNP samples at 10, 7, 3.5, 2.5, 1.75, 1.25, and 0.8765 ng/well. Cells were stained with anti-SARS-CoV2 Spike antibody and a secondary antibody. Expression was detected by flow cytometry. FIG. 46 depicts the dose response curve of expression of spike protein from SARS-CoV2 spike protein, with percent of positive cells on the y-axis and Dose on the x-axis. EC50 values (ng/well) were calculated, as shown in the following table:

| | | | Coding | | EC50 |
|---|---|---|---|---|---|
| ID | Constuct | UTR | Sequence | Formulation | (ng/well) |
| 1 | KM70 | UTR4 | OmicronBA1/codeRNA 2 | RV39 | 3.34 |
| 2 | LL34 | UTR4 | OmicronBA1/codeRNA 3 | RV39 | 3.19 |
| 3 | LL35 | UTR4 | OmicronBA1/codeRNA 4 | RV39 | 4.34 |
| 4 | LL36 | UTR4 | OmicronBA1/codeRNA 5 | RV39 | 2.86 |
| 5 | LL37 | UTR4 | OmicronBA1/codeRNA 6 | RV39 | 5.03 |
| 6 | LL38 | UTR4 | OmicronBA1/codeRNA 7 | RV39 | 7.39 |

[0796] Assays were carried out twice with the same results. Drug product generated from LL34 and LL36 had EC50s lower than that observed for the KM70 drug product. UTR7 (SEQ ID NOs: 13 & 14). FIG. 47 depicts whole cell SARS-CoV2 Spike protein expression at each dose, and FIG. 48 depicts the area under the curve of all doses from FIG. 47. LL34 had 1 0.6 times larger area under the curve as that for KM71. LL36 had 1.76 times larger area under the curve as that for KM71. LL52 had 1.5 times larger area under the curve as that for KM71.

### Example 10b

[0797] KM70 and LL34-38 encapsulated in LNP as described in Example 10a were evaluated for immunogenicity in mice. Female BALB/c mice were 7 or 8 weeks old at day 0 of the study. On day 0 and day 21 of the study were injected using a 28 gauge needle into both hindleg thigh muscles with a vehicle or a unit dose per animal of 5.0 μg, 1 0.0 μg, or 0.5 μg of KM70 or LL34-38 in 50 μL (25 μL per thigh muscle). The groups of animals, numbers, construct, dose, and formulations were as follows:

| | | Construct | | | Dose | |
|---|---|---|---|---|---|---|
| Group | N | Name | UTR | Coding Sequence | (ug) | Formulation |
| 1 | 4 | N/A | N/A | Saline | N/A | N/A |
| 2 | 8 | KM70 | UTR4 | SARS-CoV2 Omicron BA1 spike protein, CR2 | 5.0 | RV39 |
| | | | | optimized | | |
| 3 | 8 | KM70 | UTR4 | Same as above | 1.0 | RV39 |
| 4 | 8 | KM70 | UTR4 | Same as above | 0.5 | RV39 |
| 5 | 8 | LL34 | UTR4 | SARS-CoV2 Omicron BA1 spike protein, CR3 | 5.0 | RV39 |
| | | | | optimized | | |
| 6 | 8 | LL34 | UTR4 | Same as above | 1.0 | RV39 |
| 7 | 8 | LL34 | UTR4 | Same as above | 0.5 | RV39 |
| 8 | 8 | LL35 | UTR4 | SARS-CoV2 Omicron BA.1 spike protein, CR4 | 5.0 | RV39 |
| | | | | optimized | | |
| 9 | 8 | LL35 | UTR4 | Same as above | 1.0 | RV39 |
| 10 | 8 | LL35 | UTR4 | Same as above | 0.5 | RV39 |
| 11 | 8 | LL36 | UTR4 | SARS-CoV2 Omicron BA.1 spike protein, CR5 | 5.0 | RV39 |
| | | | | optimized | | |
| 12 | 8 | LL36 | UTR4 | Same as above | 1.0 | RV39 |
| 13 | 8 | LL36 | UTR4 | Same as above | 0.5 | RV39 |
| 14 | 8 | LL37 | UTR4 | SARS-CoV2 Omicron BA.1 spike protein, CR6 | 5.0 | RV39 |
| | | | | optimized | | |
| 15 | 8 | LL37 | UTR4 | Same as above | 1.0 | RV39 |
| 16 | 8 | LL37 | UTR4 | Same as above | 0.5 | RV39 |
| 17 | 8 | LL38 | UTR4 | SARS-CoV2 Omicron BA.1 spike protein, CR7 | 5.0 | RV39 |
| | | | | optimized | | |
| 18 | 8 | LL38 | UTR4 | Same as above | 1.0 | RV39 |
| 19 | 8 | LL38 | UTR4 | Same as above | 0.5 | RV39 |

[0798] Samples were taken as per (A)-(C)(below):

### (A) Early Timepoint Readouts:

[0799] Day 14 Blood Draw
   [0800] Anti-S protein IgG binding antibody titers (Omicron S protein ELISA) (See FIG. 49)
[0801] Day 21 Blood Draw
   [0802] Anti-S protein IgG binding antibody titers (Omicron S protein ELISA)
   [0803] Pseudovirus neutralization Ab titers (Omicron pVNT)

### (B) Late Timepoint Readouts:

[0804] Day 35 Blood Draw and Spleen Harvest
   [0805] Anti-S protein IgG binding antibody titers (Omicron S protein ELISA) (See FIGS. 49 and 50)
   [0806] Pseudovirus neutralization Ab titers (Omicron pVNT) (See FIG. 51)
   [0807] Live virus neutralization Ab titers (See FIG. 52)

### (C) CMI Analysis:

[0808] Day 35 Spleen Harvest (See FIG. 55 for CD4 positive cells, see FIG. 56 for CD8 positive cells)

[0809] KM70, LL34, LL35, LL36, LL37, and LL38 administration when compared to the same doses of the other constructs at the same day of assay all resulted in statistically insignificant differences in levels of total IgG against anti-SARS-CoV2 BA.1 spike protein (FIGS. 49 and 50), in pseudovirus neutralization antibody titers (FIG. 51), in live virus neutralization antibody titers (FIG. 52), in SARS-COV-2 spike protein specific CD4-positive T cell responses (FIG. 55), and in SARS-COV-2 spike protein specific CD8-positive T cell responses (FIG. 56).

### Example 11a

[0810] KM70 prime (also known as LL59, as described in U.S. Ser. No. 63/413,844 as SEQ ID NOs: 119-121 (SEQ ID NO: 121 used)), LL60-62, LL66, and LL67 (see above) RNA were synthesized with 3′ poly(A) tails consisting of, from 5′ to 3′, 30 adenosine monophosphates (As), a linker, and 38 As. All recombinant RNA molecules were produced by in vitro transcription using N1-methyl pseudouridine to replace all uridines. All recombinant RNA molecules comprised a cap-1 5′ cap and a 3′ poly(A) tail. The mRNAs were purified and evaluated for mRNA integrity (by capillary gel electrophoresis), double stranded RNA (dsRNA) content (by Homogeneous Time Resolved Fluorescence [HTRF]), poly-A tail length, and percent capping.

[0811] Each RNA encapsulated in then formulated in LNPs comprising 46.3 mol % cation-ionizable lipid, RV39; 1.6 mol % PEG-conjugated lipid; 42.7 mol % cholesterol; and 9.4 mol % 1,2-diastearoyl-sn-glycero-3-phosphocholine (DSPC), i.e., the RV39 formulation.

[0812] A potency assay of the LNP encapsulated RNAs was carried out. HEK 293 cells were seeded at 3×10⁴ cells/well in a 96-well plate and incubated overnight. The cells were transduced with Omicron RNA LNP samples at 25, 50, 75, and 100 ng/well. Cells were stained with anti-SARS-CoV2 Spike antibody and a secondary antibody. Expression was detected by flow cytometry.

[0813] Assays were carried out twice with the same results. FIGS. 57A, 57B, 57C, 58A, and 58B show that HEK293 cells administered with LL59, LL60, LL61, LL62, LL66, or LL67 RNA construct had comparable whole cell spike protein expression 24 hrs (FIGS. 57A, 57B, 57C, 58A, and 58B) and 48 hrs (FIGS. 58A and 58B) after administration as measured by area under the curve of the dose response of 25, 50, 75, and 100 ng of RNA construct per well.

[0814] The fold increases and area under the curve for FIG. 58B are as follows:

| | | Fold increase |
|---|---|---|
| | Total | compared to |
| <100 ng/well | AUC | SPK001 |
| SPK001 CR2 | 111186 | 1.00 |
| LL60 CR3 | 137365 | 1.24 |
| LL61 CR4 | 114310 | 1.03 |
| LL62 CR5 | 137334 | 1.24 |
| LL66 CR6 | 117187 | 1.05 |
| LL67 CR7 | 85753 | 0.77 |

### Example 11b

[0815] KM70 prime (also known as LL159, as described in U.S. Ser. No. 63/413,844 as SEQ ID NOs: 119-121 (SEQ ID NO: 121 used)), LL60-62, LL66, and LL67 (see above) encapsulated in LNP as described in Example 11a were evaluated for immunogenicity in mice. Female BALB/c mice were 7 or 8 weeks old at day 0 of the study. On day 0 and day 21 of the study were injected using a 28 gauge needle into both hindleg thigh muscles with a vehicle or a unit dose per animal of 5.0 μg, 1.0 μg, or 0.5 μg of KM70 prime, LL60-62, LL66, or LL67 in 50 μL (25 μL per thigh muscle). The groups of animals, numbers, construct, dose, and formulations were as follows:

| | | Construct | | | Dose | |
|---|---|---|---|---|---|---|
| Group | N | Name | UTR | Coding Sequence | (ug) | Formulation |
| 1 | 4 | N/A | N/A | Saline | N/A | N/A |
| 2 | 8 | KM70 | UTR4 | SARS-CoV2 Omicron BA1 spike protein, CR2 | 5.0 | RV39 |
| | | | | optimized | | |
| 3 | 8 | KM70 | UTR4 | Same as above | 1.0 | RV39 |
| 4 | 8 | KM70 | UTR4 | Same as above | 0.5 | RV39 |
| 5 | 8 | LL60 | UTR4 | SARS-CoV2 Omicron BA1 spike protein, CR3 | 5.0 | RV39 |
| | | | | optimized | | |
| 6 | 8 | LL60 | UTR4 | Same as above | 1.0 | RV39 |
| 7 | 8 | LL60 | UTR4 | Same as above | 0.5 | RV39 |
| 8 | 8 | LL61 | UTR4 | SARS-CoV2 Omicron BA.1 spike protein, CR4 | 5.0 | RV39 |
| | | | | optimized | | |
| 9 | 8 | LL61 | UTR4 | Same as above | 1.0 | RV39 |
| 10 | 8 | LL61 | UTR4 | Same as above | 0.5 | RV39 |
| 11 | 8 | LL62 | UTR4 | SARS-CoV2 Omicron BA.1 spike protein, CR5 | 5.0 | RV39 |
| | | | | optimized | | |
| 12 | 7 | LL62 | UTR4 | Same as above | 1.0 | RV39 |
| 13 | 8 | LL62 | UTR4 | Same as above | 0.5 | RV39 |
| 14 | 8 | LL66 | UTR4 | SARS-CoV2 Omicron BA.1 spike protein, CR6 | 5.0 | RV39 |
| | | | | optimized | | |
| 15 | 8 | LL66 | UTR4 | Same as above | 1.0 | RV39 |
| 16 | 8 | LL66 | UTR4 | Same as above | 0.5 | RV39 |
| 17 | 8 | LL67 | UTR4 | SARS-CoV2 Omicron BA.1 spike protein, CR7 | 5.0 | RV39 |
| | | | | optimized | | |
| 18 | 8 | LL67 | UTR4 | Same as above | 1.0 | RV39 |
| 19 | 8 | LL67 | UTR4 | Same as above | 0.5 | RV39 |

### Day 35 Blood Draw and Spleen Harvest

[0816] Anti-S protein IgG binding antibody titers (Omicron S protein ELISA) (See FIG. 59) FIG. 59 show statistically insignificant differences in serum levels of total IgG against anti-SARS-CoV2 BA.5 spike protein at day 21 after the first administration of one of RNA constructs LL59 (a.k.a. KM70 prime), 1LL60, 1LL61, LL162, LL166, and LL67 formulated in RV39 at doses of 0.5 μg, 1 μg, or 5 μg to mice. A second administration of the same doses occurred at day 21 (21 days after the first dose (day 0)). Statistical significance was found in measures between saline treated and construct treated animals.

### Example 12a

[0817] KM70 prime (also known as 1LLS9, as described in U.S. Ser. No. 63/413,844 as SEQ ID NOs: 119-121 (SEQ ID NO: 121 used, also known as SPK001 or SPK007 depending upon the poly(A) tail)) and a new construct SP035 or SP045, which consisted of, from 5′ to 3′, SEQ ID NO: 13, then SEQ NO: 128, then SEQ ID NO: 7, RNA were synthesized with 3′ poly(A) tails consisting of, from 5′ to 3′, 30 adenosine monophosphates (As), a linker, and 87 As or with 3′ poly(A) tails consisting of, from 5′ to 3′, 30 adenosine monophosphates (As), a linker, and 37 As. SPK001 is KM70 prime ending with 37 As. SPK007 is KM70 prime ending with 87 As. SP035 ends with 87 As. SP045 ends with 37 As. All recombinant RNA molecules were produced by in vitro transcription using N1-methyl pseudouridine to replace all uridines. All recombinant RNA molecules comprised a cap-1 5′ cap and a 3′ poly(A) tail. The mRNAs were purified and evaluated for mRNA integrity (by capillary gel electrophoresis), double stranded RNA (dsRNA) content (by Homogeneous Time Resolved Fluorescence [HTRF]), poly-A tail length, and percent capping.

[0818] Each RNA encapsulated in then formulated in LNPs comprising 46.3 mol % cation-ionizable lipid, RV39; 1.6 mol % PEG-conjugated lipid; 42.7 mol % cholesterol; and 9.4 mol % 1,2-diastearoyl-sn-glycero-3-phosphocholine (DSPC), i.e., the RV39 formulation.

[0819] A potency assay of the LNP encapsulated RNAs was carried out. HEK 293 cells were seeded at 3×10⁴ cells/well in a 96-well plate and incubated overnight. The cells were transduced with Omicron RNA LNP samples at 25, 50, and 100 ng/well. Cells were stained with anti-SARS-CoV2 Spike antibody and a secondary antibody. Expression was detected by flow cytometry.

[0820] FIG. 60 shows that adding 5′ UTR7 and 3′ UTR4 into a construct, SP035, results in 2-2.45 higher area under the curve as obtained with LL59, which has 5′ UTR4 and 3′ UTR4. In both constructs, the 3′ poly(A) tail had 30 As, a linker, then 87 As.

[0821] The results for the other two constructs are as follows:

| | Fold change in protein |
|---|---|
| mRNA construct | expression vs SPK001 |
| SPK001 | 1.00 |
| 5′UTR4/codeRNA2/3′UTR4/30- | |
| Linker-37 | |
| SPK007 | 0.91 |
| 5′UTR4/codeRNA2/3′UTR4 | |
| 30-Linker-87 | |
| SP045 | 1.36 |
| 5′UTR7/codeRNA2/3′UTR4 | |
| 30-Linker-37 | |
| SP035 | 1.82 |
| 5′UTR7/codeRNA2/3′UTR4 | |
| 30-Linker-87 | |

### Other Embodiments

[0822] The recitation of a listing of elements in any definition of a variable herein includes definitions of that variable as any single element or combination (or subcombination) of listed elements. The recitation of an embodiment herein includes that embodiment as any single embodiment or in combination with any other embodiments or portions thereof.

[0823] The disclosures of each and every patent, patent application, publication of a patent application, and publication cited herein are hereby incorporated herein by reference in its entirety. While this invention has been disclosed with reference to specific embodiments, it is apparent that other embodiments and variations of this invention may be devised without departing from the true spirit and scope of the invention. The appended claims are intended to be construed to include all such embodiments and equivalent variations.

### REFERENCES

[0824] All references cited in this document are incorporated by reference in their entirety for all purposes and for convenience have been listed below. The omission of any reference in the list below after being cited in this document does not negate the above-noted incorporation by reference. List of references:
[0825] NCBI (www.ncbi.nlm.nih.gov) Accession NOs: NM_001101.5, NG_056261.1, NM_000477.7, AH002618.2, NM_001686.4, U09278.2, NM_001291807.3, NR_168448.1, NG_007073.2, NR_152150.2, NG_029473.1, NM_153201.4, AH002842.2, NM_000586.4, NG_013080.2, NM_001961.4, NM_000558, OL521838, and NM_001130;
[0826] The World Health Organization: International Nonproprietary Names Programme. Messenger RNA Encoding the Full-Length SARS-CoV-2 Spike Glycoprotein; p. 11868;
[0827] Edo Kon, Uri Elia, and Dann Peer, “Principles for designing an optimal mRNA lipid nanoparticle vaccine,” Curr. Opin. Biotechnol. 2022, 73:329-336;
[0828] Harlow et al., 1999, In: Using Antibodies: A Laboratory Manual, Cold Spring Harbor Laboratory Press, NY;
[0829] Harlow et al., 1989, In: Antibodies: A Laboratory Manual, Cold Spring Harbor, N.Y.;
[0830] Houston et al., 1988, Proc. Natl. Acad. Sci. USA 85:5879-5883; Bird et al., 1988, Science 242:423-426;
[0831] Zhang et al., 2001, “Ionization behavior of amino lipids for siRNA delivery: determination of ionization constants, SAR, and the impact of lipid pKa on cationic lipid-biomembrane interactions, LANGMUIR 27: 1907-1914;
[0832] WO2012/006376;
[0833] WO2012/030901;
[0834] WO2012/031046;
[0835] WO2012/031043;
[0836] WO2012/006378;
[0837] WO2011/076807;
[0838] WO2013/033563;
[0839] WO2013/006825;
[0840] WO2014/136086;
[0841] WO2015/095340;
[0842] WO2015/095346;
[0843] WO2016/037053;
[0844] WO2017/075531;
[0845] WO2018/081480;
[0846] WO2015/074085;
[0847] WO2018/170332;
[0848] WO2010/053572;
[0849] WO2012/170930;
[0850] WO2014/197651;
[0851] WO2015/123767;
[0852] WO2019/064115;
[0853] U.S. Patent Application Publication NOs.: 20220081392, 20220072155, 20220040285, 20210395188, 20210251898, 20210128488, 20210122703, 20210122702, 20210107861, 20200283372,20200172472,20200163878,20200121809,20200046838,20190359556, 20190314524, 20190274968, 20190270697, 20190022247, 20180185516, 20170283367, 20170157268,20170119904,20160376224,20160317676,20150376115, 20150140070A1, and 20100324120;
[0854] U.S. Application Nos. 61/905,724 and Ser. No. 15/614,499;
[0855] U.S. Pat. Nos. 8,802,863, 9,458,090, 9,593,077, 9,567,296, 9,604,908, 9,643,916, 9,669,097, 9,670,487, 9,737,619, 9,738,593, 9,725,720, 9,796,977,10,106,490, 10,166,298, 10,221,127, 10,723,692, 11,040,112, 11,168,051, and 11,285,222; and
[0856] Geall et al. (2012) PNAS USA. September 4; 109(36): 14604-9.

### Interpretation of Sequence Listing

[0857] In the paper copy and ASCII-format electronic copy of the Sequence Listing, it is to be understood that any “U” or “u” (uridine) depicted therein may be replaced with any of the uridine-substitutable modified nucleotides noted above, including a N1-methylpseudouridine, pseudouridine, N1-ethylpseudouridine, and that the percentage “u” replaced with uridine-substitutable modified nucleotides corresponds with those described in the embodiments above. For example, a mole percentage of the N1-methylpseudouridines to the total of the N1-methylpseudouridines and the uridines of 50% contemplates and supports substitution of 50% of the “u” with “N1ψ.” For example, a mole percentage of the N1-methylpseudouridines to the total of the N1-methylpseudouridines and the uridines of 25% contemplates and supports substitution of 25% of the “u” with “N1ψ.” For example, a mole percentage of the N1-methylpseudouridines to the total of the N1-methylpseudouridines and the uridines of 75% contemplates and supports substitution of 75% of the “u” with “N1ψ.” In the paper copy and ASCII-format electronic copy of the Sequence Listing, it is to be understood that any “A” or “a” (adenosine) depicted therein may be replaced with any of the adenosine-substitutable modified nucleotides noted above, and that the percentage “A” or “a” replaced with adenosine-substitutable modified nucleotides corresponds with those described in the embodiments above. In the paper copy and ASCII-format electronic copy of the Sequence Listing, it is to be understood that any “T” or “t” (thymidine) depicted therein may be replaced with any of the thymidine-substitutable modified nucleotides noted above, and that the percentage “T” or “t” replaced with adenosine-substitutable modified nucleotides corresponds with those described in the embodiments above. In the paper copy and ASCII-format electronic copy of the Sequence Listing, it is to be understood that any “C” or “c” (cytosine) depicted therein may be replaced with any of the cytosine-substitutable modified nucleotides noted above, and that the percentage “C” or “c” replaced cytosine-substitutable modified nucleotides corresponds with those described in the embodiments above. In the paper copy and ASCII-format electronic copy of the Sequence Listing, it is to be understood that any “G” or “g” (guanosine) depicted therein may be replaced with any of the guanosine-substitutable modified nucleotides noted above, and that the percentage “G” or “g” replaced guanosine-substitutable modified nucleotides corresponds with those described in the embodiments above.

### Sequence Identity

[0858] Identity or homology (i.e. percent identity) with respect to an amino acid sequence is defined herein as the percentage of amino acid residues in the candidate sequence that are identical with the reference amino acid sequence after aligning the sequences and introducing gaps, if necessary, to achieve the maximum percent sequence identity, and not considering any conservative substitutions as part of the sequence identity.

[0859] Identity or homology (i.e. percent identity) with respect to a nucleic acid sequence is defined herein as the percentage of nucleotides in the candidate sequence that are identical with the reference nucleic acid sequence after aligning the sequences and introducing gaps, if necessary, to achieve the maximum percent sequence identity. The exchange of uridine and thymidine shall not be taken into account for calculating percent identity. The substitution of uridine or thymidine with a uridine- or thymidine-substitutable modified nucleotide (i.e. U substituted with N1ψ) shall not be taken into account for calculating percent identity. The substitution of adenosine with an adenosine-substitutable modified nucleotide shall not be taken into account for calculating percent identity. The substitution of guanosine with a guanosine-substitutable modified nucleotide shall not be taken into account for calculating percent identity. The substitution of cytosine with a cytosine-substitutable modified nucleotide shall not be taken into account for calculating percent identity.

[0860] Where the present disclosure refers to a sequence by reference to a UniProt, Genbank, National Center for Biotechnology Information (NCBI, www.ncbi.nlm.nih.gov) reference sequence, accession number (No.), or accession code, the sequence referred to is the current version at the filing date of the earliest effective filing date. Herein a “reference sequence” and “accession code” is referred to as “accession code” for the sole purpose of simplicity and without regard to whether the original Uniprot, Genebank, or NCBI listing recites “reference sequence,” “accession no.,” or “accession code.”

The application's sequence listing, which the Patent Office published only in electronic form, follows.

SEQUENCE LISTING (225 sequences)

SEQ ID NO: 1 - RNA, 72 nt, Homo sapiens
  source 1..72: mol_type = genomic RNA
gtatattagtgctaatttccctccgtttgtcctagcttttctcttctgtcaaccccacacgcctttggcaca

SEQ ID NO: 2 - RNA, 343 nt, Homo sapiens
  source 1..343: mol_type = genomic RNA
catcacatttaaaagcatctcagcctaccatgagaataagagaaagaaaatgaagatcaaaagcttattcatctgtttttctttttcgttggtgtaaagccaacaccctgtctaaaaaacataaatttctttaatcattttgcctcttttctctgtgcttcaattaataaaaaatggaaagaatctaatagagtggtacagcactgttatttttcaaagatgtgttgctatcctgaaaattctgtaggttctgtggaagttccagtgttctctcttattccacttcggtagaggatttctagtttcttgtgggctaattaaataaatcattaatactcttcta

SEQ ID NO: 3 - RNA, 104 nt, Homo sapiens
  source 1..104: mol_type = genomic RNA
gttcacccaatggacctgcctactgcagcgtaggcctcgcctcaacggcaggagagcaggcggctgcggttgctgcagccttcagtctccacccggactacgcc

SEQ ID NO: 4 - RNA, 147 nt, Homo sapiens
  source 1..147: mol_type = genomic RNA
ggggtctttgtcctctgtactgtctctctccttgcccctaacccaaaaagcttcatttttctgtgtaggctgcacaagagccttgattgaagatatattctttctgaacagtatttaaggtttccaataaaatgtacacccctcaga

SEQ ID NO: 5 - RNA, 207 nt, Homo sapiens
  source 1..207: mol_type = genomic RNA
agaacgcccccaaaatctgtttctaattttacagaaatcttttgaaacttggcacggtattcaaaagtccgtggaaagaaaaaaaccttgtcctggcttcagcttccaactacaaagacagacttggtccttttcaacggttttcacagatccagtgacccacgctctgaagacagaattagctaactttcaaaaacatctggaaaa

SEQ ID NO: 6 - RNA, 284 nt, Homo sapiens
  source 1..284: mol_type = genomic RNA
aaacgatgcagatgcaagcctgtatcagaatctgaaaaccttatataaacccctcagacagtttgcttattttattttttatgttgtaaaatgctagtataaacaaacaaattaatgttgttctaaaggctgttaaaaaaaagatgaggactcagaagttcaagctaaatattgtttacattttctggtactctgtgaaagaagagaaaagggagtcatgcattttgctttggacacagtgttttatcacctgttcatttgaagaaaaataataaagtcagaag

SEQ ID NO: 7 - RNA, 31 nt, Homo sapiens
  source 1..31: mol_type = genomic RNA
aggagaagctgtctatcgggctccagcggtc

SEQ ID NO: 8 - RNA, 56 nt, Homo sapiens
  source 1..56: mol_type = genomic RNA
gccgccgctccagctttgcacgtttcgatcccaaaggccctttttagggccgacca

SEQ ID NO: 9 - RNA, 173 nt, Homo sapiens
  source 1..173: mol_type = genomic RNA
ggctgggactggctgagcctggcgggaggcggggtccgagtcaccgcctgccgccgcgcccccggtttctataaattgagcccgcagcctcccgcttcgctctctgctcctcctgttcgacagtcagccgcatcttcttttgcgtcgccagccgagccacatcgctcagacac

SEQ ID NO: 10 - RNA, 196 nt, Homo sapiens
  source 1..196: mol_type = genomic RNA
acccctggaccaccagccccagcaagagcacaagaggaagagagagaccctcactgctggggagtccctgccacactcagtcccccaccacactgaatctcccctcctcacagttgccatgtagaccccttgaagaggggaggggcctagggagccgcaccttgtcatgtaccatcaataaagtaccctgtgctca

SEQ ID NO: 11 - RNA, 134 nt, Homo sapiens
  source 1..134: mol_type = genomic RNA
ccttctggaaggttctaagatagggtataagaggcagggtggcgggcggaaaccggtctcattgaactcgcctgcagctcttgggttttttgtggcttccttcgttattggagccaggcctacaccccagcaac

SEQ ID NO: 12 - RNA, 240 nt, Homo sapiens
  source 1..240: mol_type = genomic RNA
ccaaccaagtgtagatgtagcattgttccacacatttaaaacatttgaaggacctaaattcgtagcaaattctgtggcagttttaaaaagttaagctgctatagtaagttactgggcattctcaatacttgaatatggaacatatgcacaggggaaggaaataacattgcactttataaacactgtattgtaagtggaaaatgcaatgtcttaaataaaactatttaaaattggcaccat

SEQ ID NO: 13 - RNA, 54 nt, Homo sapiens
  source 1..54: mol_type = genomic RNA
gttccctatcactctctttaatcactactcacagtaacctcaactcctgccaca

SEQ ID NO: 14 - RNA, 197 nt, Homo sapiens
  source 1..197: mol_type = genomic RNA
ttaagtgcttcccacttaaaacatatcaggccttctatttatttaaatatttaaattttatatttattgttgaatgtatggtttgctacctattgtaactattattcttaatcttaaaactataaatatggatcttttatgattctttttgtaagccctaggggctctaaaatggtttcacttatttatcccaaaat

SEQ ID NO: 15 - RNA, 82 nt, Homo sapiens
  source 1..82: mol_type = genomic RNA
ccgccgagaccgcgtccgccccgcgagcacagagcctcgcctttgccgatccgccgcccgtccacacccgccgccagctcac

SEQ ID NO: 16 - RNA, 599 nt, Homo sapiens
  source 1..599: mol_type = genomic RNA
gcggactatgacttagttgcgttacaccctttcttgacaaaacctaacttgcgcagaaaacaagatgagattggcatggctttatttgttttttttgttttgttttggttttttttttttttttggcttgactcaggatttaaaaactggaacggtgaaggtgacagcagtcggttggagcgagcatcccccaaagttcacaatgtggccgaggactttgattgcacattgttgtttttttaatagtcattccaaatatgagatgcgttgttacaggaagtcccttgccatcctaaaagccaccccacttctctctaaggagaatggcccagtcctctcccaagtccacacaggggaggtgatagcattgctttcgtgtaaattatgtaatgcaaaatttttttaatcttcgccttaatacttttttattttgttttattttgaatgatgagccttcgtgcccccccttcccccttttttgtcccccaacttgagatgtatgaaggcttttggtctccctgggagtgggtggaggcagccagggcttacctgtacactgacttgagaccagttgaataaaagtgcacaccttaaaaatg

SEQ ID NO: 17 - RNA, 485 nt, Homo sapiens
  source 1..485: mol_type = genomic RNA
gggctttgcctgtcattctgcagttctagtgtggggtctgggcgcagttcttttccctctccagcctcggagtcttcctctgtggactgcgcagataggactggtggcacggaccagctctgcagccctggagtcaggagcagagccccccggctcccagcccgccgtagccgctcctggcaccgagcgagccgcgatgacaatggctgcattgtgcttcatgtcccttcccatcaacatttctgtgctggactccttccactcgcgggtcgtctccagagctcagaaaatgaggtgatcagtgggacgagtaaggaaggggggttgggagaggggcgattgggcaacccggctgcacaaacacgggaggtcaaagattgcgcccagcccgcccaggccgggaatggaataaagggacgcggggcgccggaggctgcacagaagcgagtccgactgtgctcgctgctcagcgccgcacccggaag

SEQ ID NO: 18 - RNA, 385 nt, Homo sapiens
  source 1..385: mol_type = genomic RNA
aatctcagaggtagggctgccaccaaggtgaagatgggaacgcagatgatccatgagtttgccctggtttcactggcccaagtggtttgtgctaaccacgtctgtcttcacagctctgtgttgccatgtgtgctgaacaaaaaataaaaattattattgattttatatttcaaaaactccattctttcctaaatattttcaacaaaggatttctttatgcattctgcctaaatacctatgcaactgagcccttccttctcagctcaagattcgtctggtctttccctacagctttgtgtgtgccatggccacatctcctgggtacagttcaaggagacatcttttctaaaagggtctgcgtgatcattaaaatataatcaaatgt

SEQ ID NO: 19 - RNA, 83 nt, Homo sapiens
  source 1..83: mol_type = genomic RNA
ctcttccgccgtcgtcgccgccatcctcggcgcgactcgcttctttcggttctacctgggagaatccaccgccatccgccacc

SEQ ID NO: 20 - RNA, 497 nt, Homo sapiens
  source 1..497: mol_type = genomic RNA
gcggcccttcctgcagcgcctgccgccccggggactcgcagcacccacagcaccacgtcctcgaattctcagacgacacctggagactgtcccgacacagcgacgctcccctgagaggtttctggggcccgctgcgtgccatcactcaaccataacacttgatgccgtttctttcaatatttatttccagagtccggaggcagcagacacgccctcttagtagggacttaatgggccggtcggggagggggaggcgggatgggacacccaacactttttccatttcttcagagggaaactcagatgtccaaactaattttaacaaacgcattaagaggtttatttgggtacatggcccgcagtggcttttgccccagaaaggggaaaggaacacgcgggtagatgatttctagcaggcaggaagtcctgtgcggtgtcaccatgagcacctccagctgtactagtgccattggaataataaatttgataaggtggtg

SEQ ID NO: 21 - RNA, 53 nt, unidentified
  source 1..53: mol_type = unassigned RNA
agaataaactagtattcttctggtccccacagactcagagagaacccgccacc

SEQ ID NO: 22 - RNA, 295 nt, unidentified
  source 1..295: mol_type = unassigned RNA
ctcgagctggtactgcatgcacgcaatgctagctgcccctttcccgtcctgggtaccccgagtctcccccgacctcgggtcccaggtatgctcccacctccacctgccccactcaccacctctgctagttccagacacctcccaagcacgcagcaatgcagctcaaaacgcttagcctagccacacccccacgggaaacagcagtgattaacctttagcaataaacgaaagtttaactaagctatactaaccccagggttggtcaatttcgtgccagccacaccctggagctagc

SEQ ID NO: 23 - RNA, 57 nt, unidentified
  source 1..57: mol_type = unassigned RNA
gggaaataagagagaaaagaagagtaagaagaaatataagaccccggcgccgccacc

SEQ ID NO: 24 - RNA, 110 nt, unidentified
  source 1..110: mol_type = unassigned RNA
gctggagcctcggtggccaagcttcttgccccttgggcctccccccagcccctcctccccttcctgcacccgtacccccgtggtctttgaataaagtctgagtgggcggc

SEQ ID NO: 25 - RNA, 17 nt, unidentified
  source 1..17: mol_type = unassigned RNA
ggaggagaaagcttacc

SEQ ID NO: 26 - RNA, 202 nt, unidentified
  source 1..202: mol_type = unassigned RNA
ggactagttataagactgactagcccgatgggcctcccaacgggccctcctcccctccttgcaccgagattaataaaaaaaaaaaaaaaaaaaaaaaaaaaaaaaaaaaaaaaaaaaaaaaaaaaaaaaaaaaaaaaatgcatcccccccccccccccccccccccccccccccaaaggctcttttcagagccaccagaatt

SEQ ID NO: 27 - RNA, 80 nt, unidentified
  source 1..80: mol_type = unassigned RNA
gattccccgcctcctcctgtcccgcagtcggcgtccagcggctctgcttgttcgtgtgtgtgtcgttgcaggccttattc

SEQ ID NO: 28 - RNA, 82 nt, unidentified
  source 1..82: mol_type = unassigned RNA
ccctgttcccagagcccacttttttttctttttttgaaataaaatagcctgtctttcacaaaggctcttttcagagccacct

SEQ ID NO: 29 - RNA, 3810 nt, synthetic construct
  source 1..3810: mol_type = other RNA
atgtttgtgttcctggtgctgctgcccctggtcagcagccagtgcgtgaacctgaccacacgcacccagctgccccccgcctacaccaacagcttcaccaggggggtctactaccccgacaaggtgttcagatccagcgtgctgcacagcacccaggacctgttcctgccattcttctccaacgtgacatggttccacgtgatcagcgggaccaacggcacaaagcggttcgacaaccccgtgctgccattcaacgacggggtgtacttcgcctcaatcgagaaaagcaacatcatccgcggctggatcttcggcacaaccctcgacagcaagacccagtccctgctcatcgtgaacaacgccaccaacgtggtcatcaaggtctgcgagttccagttctgcaacgacccattcctggaccacaaaaacaacaagtcctggatggagtccgagttccgggtctactccagcgccaacaactgcaccttcgagtacgtgtctcagcccttcctgatggacctggagggaaagcagggcaacttcaagaacctgcgcgagttcgtcttcaagaacatcgacgggtacttcaaaatctacagcaagcacacccccatcatcgtgcgggagcccgaggacctgccccagggattcagcgccctggagccactggtggacctgccaatcggcatcaacatcacaaggttccagaccctgctggccctccacaggagctacctgacacccggcgacagcagctccggctggaccgccggggcagccgcctactacgtaggctacctgcagccaaggaccttcctgctgaaatacaacgagaacggcacaatcaccgacgccgtggactgcgccctggaccccctgagcgagaccaaatgcaccctgaaaagcttcaccgtggaaaaggggatctaccagaccagcaacttcagggtgcagcccaccgagagcatcgtgcgcttccccaacatcacaaacctgtgcccattcgacgaggtgttcaacgccacacgcttcgccagcgtgtacgcctggaaccggaaacgcatcagcaactgcgtggccgactacagcgtgctgtacaacctcgcccccttcttcaccttcaagtgctacggcgtcagcccaaccaagctcaacgacctctgcttcaccaacgtctacgccgacagcttcgtgatccgcggggacgaggtcaggcagatcgcccccggacagacaggcaacatcgccgactacaattacaaactgcccgacgacttcaccggctgcgtgatcgcctggaactccaacaaactggactccaaggtgagcggcaactacaactacctgtacaggctgttcaggaaaagcaacctgaagccgttcgagcgggacatctccacagagatctaccaggccgggaacaagccatgcaacggcgtcgccggcttcaactgctacttccccctgcggtcctactccttccgccccacctacggcgtcggccaccagccctaccgcgtcgtcgtgctctccttcgagctgctgcacgcccccgccaccgtgtgcgggccgaagaaaagcaccaacctggtgaaaaacaagtgcgtgaacttcaacttcaacgggctgaagggcaccggagtgctgaccgagtccaacaagaagttcctcccattccagcagttcgggagggacatcgccgacaccacagacgccgtgagggacccccagaccctggagatcctggacatcaccccctgcagcttcggcggcgtgagcgtgatcacccccgggacaaacacctccaaccaggtggccgtgctctaccagggcgtgaactgcaccgaggtgccagtcgccatccacgccgaccaactgacacccacctggagggtgtacagcaccggctccaacgtgttccagaccagggccgggtgcctcatcggcgccgaatacgtgaacaacagctacgagtgcgacatcccaatcggggccggcatctgcgccagctaccagacccagaccaagtcccacagacgcgcccgctccgtggcctcccagagcatcatcgcctacaccatgagcctgggagccgagaacagcgtcgcctacagcaacaacagcatcgccatccccacaaacttcaccatcagcgtgaccaccgagatcctgcccgtgtcgatgaccaagacatccgtggactgcacaatgtacatctgcggcgacagcacagagtgcagcaacctcctgctgcagtacggcagcttctgcacacagctgaaaagagccctgaccggcatcgccgtggagcaggacaagaacacacaggaggtgttcgcccaggtgaagcagatctacaaaaccccacccatcaagtacttcggcggattcaacttcagccagatcctgcccgaccccagcaagccctccaagagaagcttcatcgaggacctgctctttaacaaggtgaccctggccgacgccggattcatcaagcagtacggcgactgcctgggcgacatcgccgccagagacctgatctgcgcccagaaattcaaggggctgaccgtgctgccccccctgctcaccgacgagatgatcgcccagtacaccagcgccctgctcgccggcaccatcacctccggctggaccttcggcgccggagccgccctccagatccccttcgccatgcagatggcctaccgcttcaacgggatcggggtgacccagaacgtgctgtacgagaaccagaagctgatcgccaaccagttcaacagcgccatcggcaagatccaggacagcctctcgagcacagcctccgccctgggcaagctccaggacgtcgtcaaccacaatgcccaggccctgaacaccctcgtgaagcagctgtccagcaagttcggcgccatcagcagcgtgctcaacgacatcttcagccgcctcgaccccccagaagcagaggtccagatcgaccgcctgatcaccggcaggctgcagagcctgcagacctacgtgacacagcagctgatcagggccgccgagatcagggcctccgccaacctggccgccaccaaaatgagcgagtgcgtgctgggccagtccaagcgcgtggacttctgcgggaagggctaccacctgatgtccttcccacagagcgccccccacggggtggtgttcctgcacgtgacctacgtgccagcccaggagaagaacttcacaaccgccccagccatctgccacgacggcaaggcccacttcccccgcgagggggtgttcgtgtccaacggcacacactggttcgtcacacagcgcaacttctacgaaccccagatcatcaccaccgacaacacattcgtgtccggcaactgcgacgtggtgattgggatcgtgaacaacaccgtgtacgaccccctccagccagagctggacagcttcaaggaggaactggacaagtacttcaagaaccacacaagccccgacgtcgacctgggggacatcagcggcatcaacgccagcgtggtgaacatccagaaggagatcgaccggctgaacgaggtggccaagaacctgaacgagagcctcatcgacctacaggaactggggaagtacgagcagtacatcaaatggccctggtacatctggctgggcttcatcgccggcctgatcgccatcgtgatggtgaccatcatgctgtgctgcatgaccagctgctgcagctgcctgaagggctgctgcagctgcgggagctgctgcaagttcgacgaggacgactccgaacccgtgctgaaaggcgtgaagctgcactacacc

SEQ ID NO: 30 - RNA, 3810 nt, synthetic construct
  source 1..3810: mol_type = other RNA
atgttcgtgttcctggtgctgctgcccctggtgagcagccagtgcgtgaacctgaccaccaggacccagctgccccccgcctacaccaacagcttcacccggggcgtgtactaccccgacaaggtgttcaggagcagcgtgctgcacagcacccaggacctgttcctgcccttcttcagcaacgtgacctggttccacgtgatcagcggcaccaacggcaccaagcggttcgacaaccccgtgctgcccttcaacgacggcgtgtacttcgccagcatcgagaaaagcaacatcatccggggctggatcttcggcaccaccctggacagcaagacccagagcctgctgatcgtgaacaacgccaccaacgtggtgatcaaggtgtgcgagttccagttctgcaacgaccccttcctggaccacaagaacaacaagagctggatggagagcgagttccgggtgtacagcagcgccaacaactgcaccttcgagtacgtgagccagcccttcctgatggacctggagggcaagcagggcaacttcaagaacctgcgggagttcgtgttcaagaacatcgacggctacttcaagatctacagcaagcacacccccatcatcgtgagggagcccgaggacctgccccagggcttcagcgccctggagcccctggtggacctgcccatcggcatcaacatcaccaggttccagaccctgctggccctgcatcggagctacctgacccccggcgatagtagcagcggctggaccgccggcgctgccgcctattacgtgggctacctgcagcccaggaccttcctactgaagtacaacgagaacggcaccatcaccgacgccgtggactgcgccctggaccccctgagcgagaccaagtgcaccctgaaaagcttcaccgtggagaagggcatctaccagaccagcaacttcagggtgcagcccaccgagagcatcgtgaggttccccaacatcaccaacctgtgccccttcgacgaggtgttcaacgccacccggttcgccagcgtgtacgcctggaaccggaagcggatcagcaactgcgtggccgactacagcgtgctgtacaacctggcccccttcttcaccttcaagtgctacggcgtgagccccaccaagctgaacgacctgtgcttcaccaacgtgtacgccgacagcttcgtgatcaggggcgacgaggtgcggcagatcgcccccggccagaccggcaacatcgccgactacaactacaagctgcccgacgacttcaccggctgcgtgatcgcctggaacagcaacaagctggacagcaaggtgagcggcaactacaactacctgtaccggctgttcaggaaaagcaacctgaagcccttcgagagggacatcagcaccgagatctaccaggccggcaacaagccctgcaacggcgtggccggcttcaactgctacttccccctgcggagctacagcttccggcccacctacggcgtgggccaccaaccctaccgggtggtggttctgagcttcgaactgctgcacgcccccgccaccgtgtgcggccccaagaaaagcaccaatctggtgaagaacaagtgcgtgaacttcaacttcaacggcctgaagggcaccggcgtgctgaccgagagcaacaagaagttcctgcccttccagcagttcggcagggacatcgccgacaccaccgacgccgtgcgggacccccagaccctggagatcctggacatcaccccctgcagcttcggcggcgtgagcgtgattacccctggcaccaacaccagcaaccaggtggccgtgctgtaccagggcgtgaactgcaccgaggtgcccgtggccatccacgcggaccagctgacccccacttggcgggtgtatagcaccggcagcaacgtgttccaaacccgggccggctgcctgatcggagccgagtatgtgaacaacagctacgagtgcgacatccccatcggcgccggcatctgcgccagctaccagacccagaccaagagccaccggagggcccggagcgtggccagccagagcatcatcgcctacaccatgagcctgggcgccgagaacagcgtggcctacagcaacaacagcatcgccatccccaccaacttcaccatcagcgtgaccaccgagatcctgcccgtgagcatgaccaagaccagcgtggactgcaccatgtacatctgcggcgacagcaccgagtgcagcaacctgctgctgcagtacggcagcttctgcacccagctgaagcgcgccctgaccggcatcgccgtggagcaggacaagaacacccaggaggtgttcgcccaggtgaagcagatctacaagaccccccccatcaagtacttcggcggcttcaacttcagccagatcctgcccgaccccagcaagcccagcaagcggagcttcatcgaggacctgctgttcaacaaggtgaccctggccgacgccggcttcatcaagcagtacggcgactgcctgggcgacatcgccgcccgggacctgatctgcgcccagaagttcaagggcctgaccgtgctgccccctctgctgaccgacgaaatgatcgcccagtacaccagtgccctgctggccggcaccataaccagcggatggaccttcggcgccggcgccgcccttcagatccccttcgccatgcagatggcctaccggttcaacggcatcggcgtgacccagaacgtgctgtacgagaaccagaagctgatcgccaaccagttcaacagcgccatcggcaagatccaggacagcctgagcagcaccgccagcgccctgggcaagctgcaggacgtggtgaaccacaacgcccaggccctgaacaccctggtgaagcagctgagcagcaagttcggcgccatcagcagcgtgctgaacgacatcttcagccggctggacccccccgaggccgaggtgcagatcgacaggctgatcactggtcggctgcagagcctgcagacctacgtgacccagcaactgatccgggccgccgagatccgcgccagcgccaacctagccgccaccaagatgagcgagtgcgtgctgggccagagcaagcgggtggacttctgcggaaaaggctaccacctgatgagcttcccccagagcgccccacacggcgtggtgttcctgcacgtgacctacgtgcccgcccaggagaagaacttcaccaccgcccccgccatctgccacgacggcaaggcccacttcccccgggagggcgtgttcgtgagcaacggcacccactggttcgtgacccagcggaacttctacgagccccagatcatcaccaccgacaacaccttcgtgagcggcaactgcgacgtggtgatcggcatcgtgaacaacaccgtgtacgaccccctgcagcccgagctggacagcttcaaggaggagctggacaagtacttcaagaaccacaccagccccgacgtggacctgggcgacatcagcggcatcaacgccagcgtggtgaacatccagaaggagatcgaccggctgaacgaggtggccaagaacctgaacgagagcctgatcgacctgcaggagctgggcaagtacgagcagtacatcaagtggccctggtacatctggctgggcttcatcgccggcctgatcgccatcgtgatggtgaccatcatgctgtgctgcatgaccagctgctgcagctgcctgaagggctgctgcagctgcggcagctgctgcaagttcgacgaggacgacagcgagcccgtgctgaagggcgtgaagctgcactacacc

SEQ ID NO: 31 - RNA, 3810 nt, synthetic construct
  source 1..3810: mol_type = other RNA
atgtttgtgttcctggtgctgctgccactggtgagctctcagtgcgtgaatctgaccacacggacccagctgcccccagcctacaccaactcttttacaaggggagtgtattaccctgacaaggtgtttagatccagcgtgctgcacagcacccaggacctgttcctgccattcttttccaatgtgacatggttccacgtgatcagcgggacaaatggcacaaagcggttcgacaaccccgtgctgcccttcaatgatggggtgtacttcgcctccatcgagaaaagcaacatcattcgcggctggatttttggaacaaccctggatagcaagacccagtctctgctgatcgtgaataacgccacaaatgtggtgatcaaggtgtgtgagttccagttttgtaatgatccatttctggaccacaagaacaataagagctggatggaatccgaatttcgggtgtactccagcgccaataactgtacattcgaatatgtgtctcagccattcctgatggatctggagggaaagcagggcaatttcaagaatctgcgcgagttcgtgttcaagaacattgacggatacttcaagatctattctaagcatacccccatcattgtgcgggaacctgaggatctgccacaggggttcagcgccctggaacctctggtggatctgccaattggaatcaatatcacacgcttccagaccctgctggccctgcaccgctcctacctgacacccggcgattctagctctgggtggaccgccggagccgccgcctactatgtgggatacctgcagccccgcaccttcctgctgaagtataatgaaaacggcaccattaccgacgccgtggactgtgccctggacccactgagcgaaaccaagtgcacactgaaatccttcaccgtggaaaaagggatctaccagaccagcaacttccgcgtgcagcctaccgaaagcattgtgcgctttcccaatattacaaacctgtgtccatttgacgaggtgttcaacgccacacgcttcgccagcgtgtatgcctggaaccggaaaagaatcagcaactgtgtggccgattacagcgtgctgtacaatctggccccatttttcaccttcaaatgttacggggtgagccctaccaagctgaacgatctgtgtttcaccaacgtgtatgccgattctttcgtgatccgcggggacgaggtgaggcagattgcccctggacagacaggaaatattgccgactataattataaactgcccgacgatttcaccgggtgcgtgattgcctggaactccaataaactggactccaaagtgagcgggaattataactacctgtataggctgttccgcaagtccaatctgaaaccattcgagcgggacatctccacagaaatttaccaggccgggaacaagccatgcaacggcgtggccggcttcaattgttattttccactgcgctcctactcttttcggccaacatatggggtggggcatcagccctacagggtggtggtgctgtcctttgaactgctgcatgcccctgccaccgtgtgcgggcctaagaaatctaccaacctggtgaagaataaatgcgtgaatttcaatttcaatgggctgaaagggacaggcgtgctgaccgaatccaataagaaatttctgccattccagcagtttgggagggacatcgccgacacaaccgacgccgtgagggatccacagaccctggaaatcctggatattacaccctgtagcttcggcggggtgtccgtgattacaccagggacaaatacatccaaccaggtggccgtgctgtatcagggcgtgaattgtaccgaagtgcccgtggccatccatgccgaccagctgacacctacctggagggtgtatagcaccggcagcaacgtgttccagacaagagccgggtgcctgattggcgccgagtacgtgaacaatagctatgaatgcgatatcccaatcggcgccgggatctgcgcctcctaccagacccagacaaagtcccacagacgggccagatctgtggcctcccagtctattatcgcctataccatgtctctgggcgccgagaacagcgtggcctattctaacaattctattgccattcccacaaatttcacaattagcgtgaccacagaaatcctgcccgtgtctatgacaaagacctccgtggattgtacaatgtatatttgtggcgacagcacagagtgcagcaacctgctgctgcagtacggctctttctgcacacagctgaaacgcgccctgacaggtattgccgtggagcaggataaaaacacacaggaagtgtttgcccaggtgaagcagatttacaaaacaccacccattaaatacttcggcggattcaacttctcccagatcctgcctgaccccagcaaaccttccaagagaagctttatcgaggacctgctgtttaacaaagtgaccctggccgatgccggatttatcaaacagtacggggactgcctgggcgatattgccgccagagatctgatctgtgcccagaaattcaaggggctgaccgtgctgcctcccctgctgaccgacgagatgatcgcccagtacaccagcgccctgctggccggcacaatcacctctggctggaccttcggcgccggcgccgccctgcagatcccatttgccatgcagatggcctacagatttaatgggatcggggtgacacagaacgtgctgtatgagaatcagaagctgattgccaatcagttcaacagcgccatcgggaagattcaggacagcctgtctagcacagcctctgccctgggcaagctgcaggatgtggtgaaccacaatgcccaggccctgaatacactggtgaagcagctgtcctctaagtttggggccatctcctctgtgctgaatgacatcttttctagactggatcctccagaagccgaggtgcagatcgaccgcctgattaccggacgcctgcagtctctgcagacctatgtgacacagcagctgattagggccgccgagattagggcctctgccaatctggccgccaccaaaatgtccgagtgtgtgctgggacagtccaagcgggtggatttttgtgggaaagggtaccatctgatgtccttcccccagagcgcccctcacggagtggtgttcctgcacgtgacctacgtgccagcccaggagaagaactttacaaccgccccagccatctgccacgatgggaaggcccacttcccccgcgaaggggtgttcgtgtctaatgggacccactggtttgtgacacagcgcaacttttacgaacctcagattatcacaaccgacaatacattcgtgtccgggaattgtgatgtggtgattggaattgtgaacaataccgtgtacgatcccctgcagcccgagctggactcttttaaagaggaactggataaatactttaagaaccacacctcccccgacgtggacctgggggacatttctggaattaatgccagcgtggtgaatattcagaaagagattgacaggctgaacgaggtggccaagaatctgaacgaaagcctgatcgacctgcaggaactgggaaagtatgaacagtacattaaatggccctggtacatctggctgggctttatcgccggcctgatcgccatcgtgatggtgaccattatgctgtgttgcatgacaagctgctgttcttgtctgaagggctgctgtagctgtgggagctgttgcaagttcgacgaggacgattccgaacccgtgctgaaaggagtgaagctgcactacacc

SEQ ID NO: 32 - RNA, 4307 nt, synthetic construct
  source 1..4307: mol_type = other RNA
agaacgcccccaaaatctgtttctaattttacagaaatcttttgaaacttggcacggtattcaaaagtccgtggaaagaaaaaaaccttgtcctggcttcagcttccaactacaaagacagacttggtccttttcaacggttttcacagatccagtgacccacgctctgaagacagaattagctaactttcaaaaacatctggaaaaatgtttgtgttcctggtgctgctgccactggtgagctctcagtgcgtgaatctgaccacacggacccagctgcccccagcctacaccaactcttttacaaggggagtgtattaccctgacaaggtgtttagatccagcgtgctgcacagcacccaggacctgttcctgccattcttttccaatgtgacatggttccacgtgatcagcgggacaaatggcacaaagcggttcgacaaccccgtgctgcccttcaatgatggggtgtacttcgcctccatcgagaaaagcaacatcattcgcggctggatttttggaacaaccctggatagcaagacccagtctctgctgatcgtgaataacgccacaaatgtggtgatcaaggtgtgtgagttccagttttgtaatgatccatttctggaccacaagaacaataagagctggatggaatccgaatttcgggtgtactccagcgccaataactgtacattcgaatatgtgtctcagccattcctgatggatctggagggaaagcagggcaatttcaagaatctgcgcgagttcgtgttcaagaacattgacggatacttcaagatctattctaagcatacccccatcattgtgcgggaacctgaggatctgccacaggggttcagcgccctggaacctctggtggatctgccaattggaatcaatatcacacgcttccagaccctgctggccctgcaccgctcctacctgacacccggcgattctagctctgggtggaccgccggagccgccgcctactatgtgggatacctgcagccccgcaccttcctgctgaagtataatgaaaacggcaccattaccgacgccgtggactgtgccctggacccactgagcgaaaccaagtgcacactgaaatccttcaccgtggaaaaagggatctaccagaccagcaacttccgcgtgcagcctaccgaaagcattgtgcgctttcccaatattacaaacctgtgtccatttgacgaggtgttcaacgccacacgcttcgccagcgtgtatgcctggaaccggaaaagaatcagcaactgtgtggccgattacagcgtgctgtacaatctggccccatttttcaccttcaaatgttacggggtgagccctaccaagctgaacgatctgtgtttcaccaacgtgtatgccgattctttcgtgatccgcggggacgaggtgaggcagattgcccctggacagacaggaaatattgccgactataattataaactgcccgacgatttcaccgggtgcgtgattgcctggaactccaataaactggactccaaagtgagcgggaattataactacctgtataggctgttccgcaagtccaatctgaaaccattcgagcgggacatctccacagaaatttaccaggccgggaacaagccatgcaacggcgtggccggcttcaattgttattttccactgcgctcctactcttttcggccaacatatggggtggggcatcagccctacagggtggtggtgctgtcctttgaactgctgcatgcccctgccaccgtgtgcgggcctaagaaatctaccaacctggtgaagaataaatgcgtgaatttcaatttcaatgggctgaaagggacaggcgtgctgaccgaatccaataagaaatttctgccattccagcagtttgggagggacatcgccgacacaaccgacgccgtgagggatccacagaccctggaaatcctggatattacaccctgtagcttcggcggggtgtccgtgattacaccagggacaaatacatccaaccaggtggccgtgctgtatcagggcgtgaattgtaccgaagtgcccgtggccatccatgccgaccagctgacacctacctggagggtgtatagcaccggcagcaacgtgttccagacaagagccgggtgcctgattggcgccgagtacgtgaacaatagctatgaatgcgatatcccaatcggcgccgggatctgcgcctcctaccagacccagacaaagtcccacagacgggccagatctgtggcctcccagtctattatcgcctataccatgtctctgggcgccgagaacagcgtggcctattctaacaattctattgccattcccacaaatttcacaattagcgtgaccacagaaatcctgcccgtgtctatgacaaagacctccgtggattgtacaatgtatatttgtggcgacagcacagagtgcagcaacctgctgctgcagtacggctctttctgcacacagctgaaacgcgccctgacaggtattgccgtggagcaggataaaaacacacaggaagtgtttgcccaggtgaagcagatttacaaaacaccacccattaaatacttcggcggattcaacttctcccagatcctgcctgaccccagcaaaccttccaagagaagctttatcgaggacctgctgtttaacaaagtgaccctggccgatgccggatttatcaaacagtacggggactgcctgggcgatattgccgccagagatctgatctgtgcccagaaattcaaggggctgaccgtgctgcctcccctgctgaccgacgagatgatcgcccagtacaccagcgccctgctggccggcacaatcacctctggctggaccttcggcgccggcgccgccctgcagatcccatttgccatgcagatggcctacagatttaatgggatcggggtgacacagaacgtgctgtatgagaatcagaagctgattgccaatcagttcaacagcgccatcgggaagattcaggacagcctgtctagcacagcctctgccctgggcaagctgcaggatgtggtgaaccacaatgcccaggccctgaatacactggtgaagcagctgtcctctaagtttggggccatctcctctgtgctgaatgacatcttttctagactggatcctccagaagccgaggtgcagatcgaccgcctgattaccggacgcctgcagtctctgcagacctatgtgacacagcagctgattagggccgccgagattagggcctctgccaatctggccgccaccaaaatgtccgagtgtgtgctgggacagtccaagcgggtggatttttgtgggaaagggtaccatctgatgtccttcccccagagcgcccctcacggagtggtgttcctgcacgtgacctacgtgccagcccaggagaagaactttacaaccgccccagccatctgccacgatgggaaggcccacttcccccgcgaaggggtgttcgtgtctaatgggacccactggtttgtgacacagcgcaacttttacgaacctcagattatcacaaccgacaatacattcgtgtccgggaattgtgatgtggtgattggaattgtgaacaataccgtgtacgatcccctgcagcccgagctggactcttttaaagaggaactggataaatactttaagaaccacacctcccccgacgtggacctgggggacatttctggaattaatgccagcgtggtgaatattcagaaagagattgacaggctgaacgaggtggccaagaatctgaacgaaagcctgatcgacctgcaggaactgggaaagtatgaacagtacattaaatggccctggtacatctggctgggctttatcgccggcctgatcgccatcgtgatggtgaccattatgctgtgttgcatgacaagctgctgttcttgtctgaagggctgctgtagctgtgggagctgttgcaagttcgacgaggacgattccgaacccgtgctgaaaggagtgaagctgcactacacctgataaaaacgatgcagatgcaagcctgtatcagaatctgaaaaccttatataaacccctcagacagtttgcttattttattttttatgttgtaaaatgctagtataaacaaacaaattaatgttgttctaaaggctgttaaaaaaaagatgaggactcagaagttcaagctaaatattgtttacattttctggtactctgtgaaagaagagaaaagggagtcatgcattttgctttggacacagtgttttatcacctgttcatttgaagaaaaataataaagtcagaag

SEQ ID NO: 33 - RNA, 4315 nt, synthetic construct
  source 1..4315: mol_type = other RNA
agaacgcccccaaaatctgtttctaattttacagaaatcttttgaaacttggcacggtattcaaaagtccgtggaaagaaaaaaaccttgtcctggcttcagcttccaactacaaagacagacttggtccttttcaacggttttcacagatccagtgacccacgctctgaagacagaattagctaactttcaaaaacatctggaaaaatgtttgtgttcctggtgctgctgccactggtgagctctcagtgcgtgaatctgaccacacggacccagctgcccccagcctacaccaactcttttacaaggggagtgtattaccctgacaaggtgtttagatccagcgtgctgcacagcacccaggacctgttcctgccattcttttccaatgtgacatggttccacgtgatcagcgggacaaatggcacaaagcggttcgacaaccccgtgctgcccttcaatgatggggtgtacttcgcctccatcgagaaaagcaacatcattcgcggctggatttttggaacaaccctggatagcaagacccagtctctgctgatcgtgaataacgccacaaatgtggtgatcaaggtgtgtgagttccagttttgtaatgatccatttctggaccacaagaacaataagagctggatggaatccgaatttcgggtgtactccagcgccaataactgtacattcgaatatgtgtctcagccattcctgatggatctggagggaaagcagggcaatttcaagaatctgcgcgagttcgtgttcaagaacattgacggatacttcaagatctattctaagcatacccccatcattgtgcgggaacctgaggatctgccacaggggttcagcgccctggaacctctggtggatctgccaattggaatcaatatcacacgcttccagaccctgctggccctgcaccgctcctacctgacacccggcgattctagctctgggtggaccgccggagccgccgcctactatgtgggatacctgcagccccgcaccttcctgctgaagtataatgaaaacggcaccattaccgacgccgtggactgtgccctggacccactgagcgaaaccaagtgcacactgaaatccttcaccgtggaaaaagggatctaccagaccagcaacttccgcgtgcagcctaccgaaagcattgtgcgctttcccaatattacaaacctgtgtccatttgacgaggtgttcaacgccacacgcttcgccagcgtgtatgcctggaaccggaaaagaatcagcaactgtgtggccgattacagcgtgctgtacaatctggccccatttttcaccttcaaatgttacggggtgagccctaccaagctgaacgatctgtgtttcaccaacgtgtatgccgattctttcgtgatccgcggggacgaggtgaggcagattgcccctggacagacaggaaatattgccgactataattataaactgcccgacgatttcaccgggtgcgtgattgcctggaactccaataaactggactccaaagtgagcgggaattataactacctgtataggctgttccgcaagtccaatctgaaaccattcgagcgggacatctccacagaaatttaccaggccgggaacaagccatgcaacggcgtggccggcttcaattgttattttccactgcgctcctactcttttcggccaacatatggggtggggcatcagccctacagggtggtggtgctgtcctttgaactgctgcatgcccctgccaccgtgtgcgggcctaagaaatctaccaacctggtgaagaataaatgcgtgaatttcaatttcaatgggctgaaagggacaggcgtgctgaccgaatccaataagaaatttctgccattccagcagtttgggagggacatcgccgacacaaccgacgccgtgagggatccacagaccctggaaatcctggatattacaccctgtagcttcggcggggtgtccgtgattacaccagggacaaatacatccaaccaggtggccgtgctgtatcagggcgtgaattgtaccgaagtgcccgtggccatccatgccgaccagctgacacctacctggagggtgtatagcaccggcagcaacgtgttccagacaagagccgggtgcctgattggcgccgagtacgtgaacaatagctatgaatgcgatatcccaatcggcgccgggatctgcgcctcctaccagacccagacaaagtcccacagacgggccagatctgtggcctcccagtctattatcgcctataccatgtctctgggcgccgagaacagcgtggcctattctaacaattctattgccattcccacaaatttcacaattagcgtgaccacagaaatcctgcccgtgtctatgacaaagacctccgtggattgtacaatgtatatttgtggcgacagcacagagtgcagcaacctgctgctgcagtacggctctttctgcacacagctgaaacgcgccctgacaggtattgccgtggagcaggataaaaacacacaggaagtgtttgcccaggtgaagcagatttacaaaacaccacccattaaatacttcggcggattcaacttctcccagatcctgcctgaccccagcaaaccttccaagagaagctttatcgaggacctgctgtttaacaaagtgaccctggccgatgccggatttatcaaacagtacggggactgcctgggcgatattgccgccagagatctgatctgtgcccagaaattcaaggggctgaccgtgctgcctcccctgctgaccgacgagatgatcgcccagtacaccagcgccctgctggccggcacaatcacctctggctggaccttcggcgccggcgccgccctgcagatcccatttgccatgcagatggcctacagatttaatgggatcggggtgacacagaacgtgctgtatgagaatcagaagctgattgccaatcagttcaacagcgccatcgggaagattcaggacagcctgtctagcacagcctctgccctgggcaagctgcaggatgtggtgaaccacaatgcccaggccctgaatacactggtgaagcagctgtcctctaagtttggggccatctcctctgtgctgaatgacatcttttctagactggatcctccagaagccgaggtgcagatcgaccgcctgattaccggacgcctgcagtctctgcagacctatgtgacacagcagctgattagggccgccgagattagggcctctgccaatctggccgccaccaaaatgtccgagtgtgtgctgggacagtccaagcgggtggatttttgtgggaaagggtaccatctgatgtccttcccccagagcgcccctcacggagtggtgttcctgcacgtgacctacgtgccagcccaggagaagaactttacaaccgccccagccatctgccacgatgggaaggcccacttcccccgcgaaggggtgttcgtgtctaatgggacccactggtttgtgacacagcgcaacttttacgaacctcagattatcacaaccgacaatacattcgtgtccgggaattgtgatgtggtgattggaattgtgaacaataccgtgtacgatcccctgcagcccgagctggactcttttaaagaggaactggataaatactttaagaaccacacctcccccgacgtggacctgggggacatttctggaattaatgccagcgtggtgaatattcagaaagagattgacaggctgaacgaggtggccaagaatctgaacgaaagcctgatcgacctgcaggaactgggaaagtatgaacagtacattaaatggccctggtacatctggctgggctttatcgccggcctgatcgccatcgtgatggtgaccattatgctgtgttgcatgacaagctgctgttcttgtctgaagggctgctgtagctgtgggagctgttgcaagttcgacgaggacgattccgaacccgtgctgaaaggagtgaagctgcactacacctgataaaaacgatgcagatgcaagcctgtatcagaatctgaaaaccttatataaacccctcagacagtttgcttattttattttttatgttgtaaaatgctagtataaacaaacaaattaatgttgttctaaaggctgttaaaaaaaagatgaggactcagaagttcaagctaaatattgtttacattttctggtactctgtgaaagaagagaaaagggagtcatgcattttgctttggacacagtgttttatcacctgttcatttgaagaaaaataataaagtcagaagttcattgc

SEQ ID NO: 34 - RNA, 4443 nt, synthetic construct
  source 1..4443: mol_type = other RNA
aggaagaacgcccccaaaatctgtttctaattttacagaaatcttttgaaacttggcacggtattcaaaagtccgtggaaagaaaaaaaccttgtcctggcttcagcttccaactacaaagacagacttggtccttttcaacggttttcacagatccagtgacccacgctctgaagacagaattagctaactttcaaaaacatctggaaaaatgtttgtgttcctggtgctgctgccactggtgagctctcagtgcgtgaatctgaccacacggacccagctgcccccagcctacaccaactcttttacaaggggagtgtattaccctgacaaggtgtttagatccagcgtgctgcacagcacccaggacctgttcctgccattcttttccaatgtgacatggttccacgtgatcagcgggacaaatggcacaaagcggttcgacaaccccgtgctgcccttcaatgatggggtgtacttcgcctccatcgagaaaagcaacatcattcgcggctggatttttggaacaaccctggatagcaagacccagtctctgctgatcgtgaataacgccacaaatgtggtgatcaaggtgtgtgagttccagttttgtaatgatccatttctggaccacaagaacaataagagctggatggaatccgaatttcgggtgtactccagcgccaataactgtacattcgaatatgtgtctcagccattcctgatggatctggagggaaagcagggcaatttcaagaatctgcgcgagttcgtgttcaagaacattgacggatacttcaagatctattctaagcatacccccatcattgtgcgggaacctgaggatctgccacaggggttcagcgccctggaacctctggtggatctgccaattggaatcaatatcacacgcttccagaccctgctggccctgcaccgctcctacctgacacccggcgattctagctctgggtggaccgccggagccgccgcctactatgtgggatacctgcagccccgcaccttcctgctgaagtataatgaaaacggcaccattaccgacgccgtggactgtgccctggacccactgagcgaaaccaagtgcacactgaaatccttcaccgtggaaaaagggatctaccagaccagcaacttccgcgtgcagcctaccgaaagcattgtgcgctttcccaatattacaaacctgtgtccatttgacgaggtgttcaacgccacacgcttcgccagcgtgtatgcctggaaccggaaaagaatcagcaactgtgtggccgattacagcgtgctgtacaatctggccccatttttcaccttcaaatgttacggggtgagccctaccaagctgaacgatctgtgtttcaccaacgtgtatgccgattctttcgtgatccgcggggacgaggtgaggcagattgcccctggacagacaggaaatattgccgactataattataaactgcccgacgatttcaccgggtgcgtgattgcctggaactccaataaactggactccaaagtgagcgggaattataactacctgtataggctgttccgcaagtccaatctgaaaccattcgagcgggacatctccacagaaatttaccaggccgggaacaagccatgcaacggcgtggccggcttcaattgttattttccactgcgctcctactcttttcggccaacatatggggtggggcatcagccctacagggtggtggtgctgtcctttgaactgctgcatgcccctgccaccgtgtgcgggcctaagaaatctaccaacctggtgaagaataaatgcgtgaatttcaatttcaatgggctgaaagggacaggcgtgctgaccgaatccaataagaaatttctgccattccagcagtttgggagggacatcgccgacacaaccgacgccgtgagggatccacagaccctggaaatcctggatattacaccctgtagcttcggcggggtgtccgtgattacaccagggacaaatacatccaaccaggtggccgtgctgtatcagggcgtgaattgtaccgaagtgcccgtggccatccatgccgaccagctgacacctacctggagggtgtatagcaccggcagcaacgtgttccagacaagagccgggtgcctgattggcgccgagtacgtgaacaatagctatgaatgcgatatcccaatcggcgccgggatctgcgcctcctaccagacccagacaaagtcccacagacgggccagatctgtggcctcccagtctattatcgcctataccatgtctctgggcgccgagaacagcgtggcctattctaacaattctattgccattcccacaaatttcacaattagcgtgaccacagaaatcctgcccgtgtctatgacaaagacctccgtggattgtacaatgtatatttgtggcgacagcacagagtgcagcaacctgctgctgcagtacggctctttctgcacacagctgaaacgcgccctgacaggtattgccgtggagcaggataaaaacacacaggaagtgtttgcccaggtgaagcagatttacaaaacaccacccattaaatacttcggcggattcaacttctcccagatcctgcctgaccccagcaaaccttccaagagaagctttatcgaggacctgctgtttaacaaagtgaccctggccgatgccggatttatcaaacagtacggggactgcctgggcgatattgccgccagagatctgatctgtgcccagaaattcaaggggctgaccgtgctgcctcccctgctgaccgacgagatgatcgcccagtacaccagcgccctgctggccggcacaatcacctctggctggaccttcggcgccggcgccgccctgcagatcccatttgccatgcagatggcctacagatttaatgggatcggggtgacacagaacgtgctgtatgagaatcagaagctgattgccaatcagttcaacagcgccatcgggaagattcaggacagcctgtctagcacagcctctgccctgggcaagctgcaggatgtggtgaaccacaatgcccaggccctgaatacactggtgaagcagctgtcctctaagtttggggccatctcctctgtgctgaatgacatcttttctagactggatcctccagaagccgaggtgcagatcgaccgcctgattaccggacgcctgcagtctctgcagacctatgtgacacagcagctgattagggccgccgagattagggcctctgccaatctggccgccaccaaaatgtccgagtgtgtgctgggacagtccaagcgggtggatttttgtgggaaagggtaccatctgatgtccttcccccagagcgcccctcacggagtggtgttcctgcacgtgacctacgtgccagcccaggagaagaactttacaaccgccccagccatctgccacgatgggaaggcccacttcccccgcgaaggggtgttcgtgtctaatgggacccactggtttgtgacacagcgcaacttttacgaacctcagattatcacaaccgacaatacattcgtgtccgggaattgtgatgtggtgattggaattgtgaacaataccgtgtacgatcccctgcagcccgagctggactcttttaaagaggaactggataaatactttaagaaccacacctcccccgacgtggacctgggggacatttctggaattaatgccagcgtggtgaatattcagaaagagattgacaggctgaacgaggtggccaagaatctgaacgaaagcctgatcgacctgcaggaactgggaaagtatgaacagtacattaaatggccctggtacatctggctgggctttatcgccggcctgatcgccatcgtgatggtgaccattatgctgtgttgcatgacaagctgctgttcttgtctgaagggctgctgtagctgtgggagctgttgcaagttcgacgaggacgattccgaacccgtgctgaaaggagtgaagctgcactacacctgataaaaacgatgcagatgcaagcctgtatcagaatctgaaaaccttatataaacccctcagacagtttgcttattttattttttatgttgtaaaatgctagtataaacaaacaaattaatgttgttctaaaggctgttaaaaaaaagatgaggactcagaagttcaagctaaatattgtttacattttctggtactctgtgaaagaagagaaaagggagtcatgcattttgctttggacacagtgttttatcacctgttcatttgaagaaaaataataaagtcagaagttcattgcaaaaaaaaaaaaaaaaaaaaaaaaaaaaaagcatatgactaaaaaaaaaaaaaaaaaaaaaaaaaaaaaaaaaaaaaaaaaaaaaaaaaaaaaaaaaaaaaaaaaaaaaaaaaaaaaaaaaaaa

SEQ ID NO: 35 - RNA, 3900 nt, synthetic construct
  source 1..3900: mol_type = other RNA
agaagctgtctatcgggctccagcggtcatgtttgtgttcctggtgctgctgccactggtgagctctcagtgcgtgaatctgaccacacggacccagctgcccccagcctacaccaactcttttacaaggggagtgtattaccctgacaaggtgtttagatccagcgtgctgcacagcacccaggacctgttcctgccattcttttccaatgtgacatggttccacgtgatcagcgggacaaatggcacaaagcggttcgacaaccccgtgctgcccttcaatgatggggtgtacttcgcctccatcgagaaaagcaacatcattcgcggctggatttttggaacaaccctggatagcaagacccagtctctgctgatcgtgaataacgccacaaatgtggtgatcaaggtgtgtgagttccagttttgtaatgatccatttctggaccacaagaacaataagagctggatggaatccgaatttcgggtgtactccagcgccaataactgtacattcgaatatgtgtctcagccattcctgatggatctggagggaaagcagggcaatttcaagaatctgcgcgagttcgtgttcaagaacattgacggatacttcaagatctattctaagcatacccccatcattgtgcgggaacctgaggatctgccacaggggttcagcgccctggaacctctggtggatctgccaattggaatcaatatcacacgcttccagaccctgctggccctgcaccgctcctacctgacacccggcgattctagctctgggtggaccgccggagccgccgcctactatgtgggatacctgcagccccgcaccttcctgctgaagtataatgaaaacggcaccattaccgacgccgtggactgtgccctggacccactgagcgaaaccaagtgcacactgaaatccttcaccgtggaaaaagggatctaccagaccagcaacttccgcgtgcagcctaccgaaagcattgtgcgctttcccaatattacaaacctgtgtccatttgacgaggtgttcaacgccacacgcttcgccagcgtgtatgcctggaaccggaaaagaatcagcaactgtgtggccgattacagcgtgctgtacaatctggccccatttttcaccttcaaatgttacggggtgagccctaccaagctgaacgatctgtgtttcaccaacgtgtatgccgattctttcgtgatccgcggggacgaggtgaggcagattgcccctggacagacaggaaatattgccgactataattataaactgcccgacgatttcaccgggtgcgtgattgcctggaactccaataaactggactccaaagtgagcgggaattataactacctgtataggctgttccgcaagtccaatctgaaaccattcgagcgggacatctccacagaaatttaccaggccgggaacaagccatgcaacggcgtggccggcttcaattgttattttccactgcgctcctactcttttcggccaacatatggggtggggcatcagccctacagggtggtggtgctgtcctttgaactgctgcatgcccctgccaccgtgtgcgggcctaagaaatctaccaacctggtgaagaataaatgcgtgaatttcaatttcaatgggctgaaagggacaggcgtgctgaccgaatccaataagaaatttctgccattccagcagtttgggagggacatcgccgacacaaccgacgccgtgagggatccacagaccctggaaatcctggatattacaccctgtagcttcggcggggtgtccgtgattacaccagggacaaatacatccaaccaggtggccgtgctgtatcagggcgtgaattgtaccgaagtgcccgtggccatccatgccgaccagctgacacctacctggagggtgtatagcaccggcagcaacgtgttccagacaagagccgggtgcctgattggcgccgagtacgtgaacaatagctatgaatgcgatatcccaatcggcgccgggatctgcgcctcctaccagacccagacaaagtcccacagacgggccagatctgtggcctcccagtctattatcgcctataccatgtctctgggcgccgagaacagcgtggcctattctaacaattctattgccattcccacaaatttcacaattagcgtgaccacagaaatcctgcccgtgtctatgacaaagacctccgtggattgtacaatgtatatttgtggcgacagcacagagtgcagcaacctgctgctgcagtacggctctttctgcacacagctgaaacgcgccctgacaggtattgccgtggagcaggataaaaacacacaggaagtgtttgcccaggtgaagcagatttacaaaacaccacccattaaatacttcggcggattcaacttctcccagatcctgcctgaccccagcaaaccttccaagagaagctttatcgaggacctgctgtttaacaaagtgaccctggccgatgccggatttatcaaacagtacggggactgcctgggcgatattgccgccagagatctgatctgtgcccagaaattcaaggggctgaccgtgctgcctcccctgctgaccgacgagatgatcgcccagtacaccagcgccctgctggccggcacaatcacctctggctggaccttcggcgccggcgccgccctgcagatcccatttgccatgcagatggcctacagatttaatgggatcggggtgacacagaacgtgctgtatgagaatcagaagctgattgccaatcagttcaacagcgccatcgggaagattcaggacagcctgtctagcacagcctctgccctgggcaagctgcaggatgtggtgaaccacaatgcccaggccctgaatacactggtgaagcagctgtcctctaagtttggggccatctcctctgtgctgaatgacatcttttctagactggatcctccagaagccgaggtgcagatcgaccgcctgattaccggacgcctgcagtctctgcagacctatgtgacacagcagctgattagggccgccgagattagggcctctgccaatctggccgccaccaaaatgtccgagtgtgtgctgggacagtccaagcgggtggatttttgtgggaaagggtaccatctgatgtccttcccccagagcgcccctcacggagtggtgttcctgcacgtgacctacgtgccagcccaggagaagaactttacaaccgccccagccatctgccacgatgggaaggcccacttcccccgcgaaggggtgttcgtgtctaatgggacccactggtttgtgacacagcgcaacttttacgaacctcagattatcacaaccgacaatacattcgtgtccgggaattgtgatgtggtgattggaattgtgaacaataccgtgtacgatcccctgcagcccgagctggactcttttaaagaggaactggataaatactttaagaaccacacctcccccgacgtggacctgggggacatttctggaattaatgccagcgtggtgaatattcagaaagagattgacaggctgaacgaggtggccaagaatctgaacgaaagcctgatcgacctgcaggaactgggaaagtatgaacagtacattaaatggccctggtacatctggctgggctttatcgccggcctgatcgccatcgtgatggtgaccattatgctgtgttgcatgacaagctgctgttcttgtctgaagggctgctgtagctgtgggagctgttgcaagttcgacgaggacgattccgaacccgtgctgaaaggagtgaagctgcactacacctgataagccgccgctccagctttgcacgtttcgatcccaaaggccctttttagggccgacca

SEQ ID NO: 36 - RNA, 3908 nt, synthetic construct
  source 1..3908: mol_type = other RNA
agaagctgtctatcgggctccagcggtcatgtttgtgttcctggtgctgctgccactggtgagctctcagtgcgtgaatctgaccacacggacccagctgcccccagcctacaccaactcttttacaaggggagtgtattaccctgacaaggtgtttagatccagcgtgctgcacagcacccaggacctgttcctgccattcttttccaatgtgacatggttccacgtgatcagcgggacaaatggcacaaagcggttcgacaaccccgtgctgcccttcaatgatggggtgtacttcgcctccatcgagaaaagcaacatcattcgcggctggatttttggaacaaccctggatagcaagacccagtctctgctgatcgtgaataacgccacaaatgtggtgatcaaggtgtgtgagttccagttttgtaatgatccatttctggaccacaagaacaataagagctggatggaatccgaatttcgggtgtactccagcgccaataactgtacattcgaatatgtgtctcagccattcctgatggatctggagggaaagcagggcaatttcaagaatctgcgcgagttcgtgttcaagaacattgacggatacttcaagatctattctaagcatacccccatcattgtgcgggaacctgaggatctgccacaggggttcagcgccctggaacctctggtggatctgccaattggaatcaatatcacacgcttccagaccctgctggccctgcaccgctcctacctgacacccggcgattctagctctgggtggaccgccggagccgccgcctactatgtgggatacctgcagccccgcaccttcctgctgaagtataatgaaaacggcaccattaccgacgccgtggactgtgccctggacccactgagcgaaaccaagtgcacactgaaatccttcaccgtggaaaaagggatctaccagaccagcaacttccgcgtgcagcctaccgaaagcattgtgcgctttcccaatattacaaacctgtgtccatttgacgaggtgttcaacgccacacgcttcgccagcgtgtatgcctggaaccggaaaagaatcagcaactgtgtggccgattacagcgtgctgtacaatctggccccatttttcaccttcaaatgttacggggtgagccctaccaagctgaacgatctgtgtttcaccaacgtgtatgccgattctttcgtgatccgcggggacgaggtgaggcagattgcccctggacagacaggaaatattgccgactataattataaactgcccgacgatttcaccgggtgcgtgattgcctggaactccaataaactggactccaaagtgagcgggaattataactacctgtataggctgttccgcaagtccaatctgaaaccattcgagcgggacatctccacagaaatttaccaggccgggaacaagccatgcaacggcgtggccggcttcaattgttattttccactgcgctcctactcttttcggccaacatatggggtggggcatcagccctacagggtggtggtgctgtcctttgaactgctgcatgcccctgccaccgtgtgcgggcctaagaaatctaccaacctggtgaagaataaatgcgtgaatttcaatttcaatgggctgaaagggacaggcgtgctgaccgaatccaataagaaatttctgccattccagcagtttgggagggacatcgccgacacaaccgacgccgtgagggatccacagaccctggaaatcctggatattacaccctgtagcttcggcggggtgtccgtgattacaccagggacaaatacatccaaccaggtggccgtgctgtatcagggcgtgaattgtaccgaagtgcccgtggccatccatgccgaccagctgacacctacctggagggtgtatagcaccggcagcaacgtgttccagacaagagccgggtgcctgattggcgccgagtacgtgaacaatagctatgaatgcgatatcccaatcggcgccgggatctgcgcctcctaccagacccagacaaagtcccacagacgggccagatctgtggcctcccagtctattatcgcctataccatgtctctgggcgccgagaacagcgtggcctattctaacaattctattgccattcccacaaatttcacaattagcgtgaccacagaaatcctgcccgtgtctatgacaaagacctccgtggattgtacaatgtatatttgtggcgacagcacagagtgcagcaacctgctgctgcagtacggctctttctgcacacagctgaaacgcgccctgacaggtattgccgtggagcaggataaaaacacacaggaagtgtttgcccaggtgaagcagatttacaaaacaccacccattaaatacttcggcggattcaacttctcccagatcctgcctgaccccagcaaaccttccaagagaagctttatcgaggacctgctgtttaacaaagtgaccctggccgatgccggatttatcaaacagtacggggactgcctgggcgatattgccgccagagatctgatctgtgcccagaaattcaaggggctgaccgtgctgcctcccctgctgaccgacgagatgatcgcccagtacaccagcgccctgctggccggcacaatcacctctggctggaccttcggcgccggcgccgccctgcagatcccatttgccatgcagatggcctacagatttaatgggatcggggtgacacagaacgtgctgtatgagaatcagaagctgattgccaatcagttcaacagcgccatcgggaagattcaggacagcctgtctagcacagcctctgccctgggcaagctgcaggatgtggtgaaccacaatgcccaggccctgaatacactggtgaagcagctgtcctctaagtttggggccatctcctctgtgctgaatgacatcttttctagactggatcctccagaagccgaggtgcagatcgaccgcctgattaccggacgcctgcagtctctgcagacctatgtgacacagcagctgattagggccgccgagattagggcctctgccaatctggccgccaccaaaatgtccgagtgtgtgctgggacagtccaagcgggtggatttttgtgggaaagggtaccatctgatgtccttcccccagagcgcccctcacggagtggtgttcctgcacgtgacctacgtgccagcccaggagaagaactttacaaccgccccagccatctgccacgatgggaaggcccacttcccccgcgaaggggtgttcgtgtctaatgggacccactggtttgtgacacagcgcaacttttacgaacctcagattatcacaaccgacaatacattcgtgtccgggaattgtgatgtggtgattggaattgtgaacaataccgtgtacgatcccctgcagcccgagctggactcttttaaagaggaactggataaatactttaagaaccacacctcccccgacgtggacctgggggacatttctggaattaatgccagcgtggtgaatattcagaaagagattgacaggctgaacgaggtggccaagaatctgaacgaaagcctgatcgacctgcaggaactgggaaagtatgaacagtacattaaatggccctggtacatctggctgggctttatcgccggcctgatcgccatcgtgatggtgaccattatgctgtgttgcatgacaagctgctgttcttgtctgaagggctgctgtagctgtgggagctgttgcaagttcgacgaggacgattccgaacccgtgctgaaaggagtgaagctgcactacacctgataagccgccgctccagctttgcacgtttcgatcccaaaggccctttttagggccgaccattcattgc

SEQ ID NO: 37 - RNA, 4035 nt, synthetic construct
  source 1..4035: mol_type = other RNA
aggagaagctgtctatcgggctccagcggtcatgtttgtgttcctggtgctgctgccactggtgagctctcagtgcgtgaatctgaccacacggacccagctgcccccagcctacaccaactcttttacaaggggagtgtattaccctgacaaggtgtttagatccagcgtgctgcacagcacccaggacctgttcctgccattcttttccaatgtgacatggttccacgtgatcagcgggacaaatggcacaaagcggttcgacaaccccgtgctgcccttcaatgatggggtgtacttcgcctccatcgagaaaagcaacatcattcgcggctggatttttggaacaaccctggatagcaagacccagtctctgctgatcgtgaataacgccacaaatgtggtgatcaaggtgtgtgagttccagttttgtaatgatccatttctggaccacaagaacaataagagctggatggaatccgaatttcgggtgtactccagcgccaataactgtacattcgaatatgtgtctcagccattcctgatggatctggagggaaagcagggcaatttcaagaatctgcgcgagttcgtgttcaagaacattgacggatacttcaagatctattctaagcatacccccatcattgtgcgggaacctgaggatctgccacaggggttcagcgccctggaacctctggtggatctgccaattggaatcaatatcacacgcttccagaccctgctggccctgcaccgctcctacctgacacccggcgattctagctctgggtggaccgccggagccgccgcctactatgtgggatacctgcagccccgcaccttcctgctgaagtataatgaaaacggcaccattaccgacgccgtggactgtgccctggacccactgagcgaaaccaagtgcacactgaaatccttcaccgtggaaaaagggatctaccagaccagcaacttccgcgtgcagcctaccgaaagcattgtgcgctttcccaatattacaaacctgtgtccatttgacgaggtgttcaacgccacacgcttcgccagcgtgtatgcctggaaccggaaaagaatcagcaactgtgtggccgattacagcgtgctgtacaatctggccccatttttcaccttcaaatgttacggggtgagccctaccaagctgaacgatctgtgtttcaccaacgtgtatgccgattctttcgtgatccgcggggacgaggtgaggcagattgcccctggacagacaggaaatattgccgactataattataaactgcccgacgatttcaccgggtgcgtgattgcctggaactccaataaactggactccaaagtgagcgggaattataactacctgtataggctgttccgcaagtccaatctgaaaccattcgagcgggacatctccacagaaatttaccaggccgggaacaagccatgcaacggcgtggccggcttcaattgttattttccactgcgctcctactcttttcggccaacatatggggtggggcatcagccctacagggtggtggtgctgtcctttgaactgctgcatgcccctgccaccgtgtgcgggcctaagaaatctaccaacctggtgaagaataaatgcgtgaatttcaatttcaatgggctgaaagggacaggcgtgctgaccgaatccaataagaaatttctgccattccagcagtttgggagggacatcgccgacacaaccgacgccgtgagggatccacagaccctggaaatcctggatattacaccctgtagcttcggcggggtgtccgtgattacaccagggacaaatacatccaaccaggtggccgtgctgtatcagggcgtgaattgtaccgaagtgcccgtggccatccatgccgaccagctgacacctacctggagggtgtatagcaccggcagcaacgtgttccagacaagagccgggtgcctgattggcgccgagtacgtgaacaatagctatgaatgcgatatcccaatcggcgccgggatctgcgcctcctaccagacccagacaaagtcccacagacgggccagatctgtggcctcccagtctattatcgcctataccatgtctctgggcgccgagaacagcgtggcctattctaacaattctattgccattcccacaaatttcacaattagcgtgaccacagaaatcctgcccgtgtctatgacaaagacctccgtggattgtacaatgtatatttgtggcgacagcacagagtgcagcaacctgctgctgcagtacggctctttctgcacacagctgaaacgcgccctgacaggtattgccgtggagcaggataaaaacacacaggaagtgtttgcccaggtgaagcagatttacaaaacaccacccattaaatacttcggcggattcaacttctcccagatcctgcctgaccccagcaaaccttccaagagaagctttatcgaggacctgctgtttaacaaagtgaccctggccgatgccggatttatcaaacagtacggggactgcctgggcgatattgccgccagagatctgatctgtgcccagaaattcaaggggctgaccgtgctgcctcccctgctgaccgacgagatgatcgcccagtacaccagcgccctgctggccggcacaatcacctctggctggaccttcggcgccggcgccgccctgcagatcccatttgccatgcagatggcctacagatttaatgggatcggggtgacacagaacgtgctgtatgagaatcagaagctgattgccaatcagttcaacagcgccatcgggaagattcaggacagcctgtctagcacagcctctgccctgggcaagctgcaggatgtggtgaaccacaatgcccaggccctgaatacactggtgaagcagctgtcctctaagtttggggccatctcctctgtgctgaatgacatcttttctagactggatcctccagaagccgaggtgcagatcgaccgcctgattaccggacgcctgcagtctctgcagacctatgtgacacagcagctgattagggccgccgagattagggcctctgccaatctggccgccaccaaaatgtccgagtgtgtgctgggacagtccaagcgggtggatttttgtgggaaagggtaccatctgatgtccttcccccagagcgcccctcacggagtggtgttcctgcacgtgacctacgtgccagcccaggagaagaactttacaaccgccccagccatctgccacgatgggaaggcccacttcccccgcgaaggggtgttcgtgtctaatgggacccactggtttgtgacacagcgcaacttttacgaacctcagattatcacaaccgacaatacattcgtgtccgggaattgtgatgtggtgattggaattgtgaacaataccgtgtacgatcccctgcagcccgagctggactcttttaaagaggaactggataaatactttaagaaccacacctcccccgacgtggacctgggggacatttctggaattaatgccagcgtggtgaatattcagaaagagattgacaggctgaacgaggtggccaagaatctgaacgaaagcctgatcgacctgcaggaactgggaaagtatgaacagtacattaaatggccctggtacatctggctgggctttatcgccggcctgatcgccatcgtgatggtgaccattatgctgtgttgcatgacaagctgctgttcttgtctgaagggctgctgtagctgtgggagctgttgcaagttcgacgaggacgattccgaacccgtgctgaaaggagtgaagctgcactacacctgataagccgccgctccagctttgcacgtttcgatcccaaaggccctttttagggccgaccattcattgcaaaaaaaaaaaaaaaaaaaaaaaaaaaaaagcatatgactaaaaaaaaaaaaaaaaaaaaaaaaaaaaaaaaaaaaaaaaaaaaaaaaaaaaaaaaaaaaaaaaaaaaaaaaaaaaaaaaaaaa

SEQ ID NO: 38 - RNA, 4068 nt, synthetic construct
  source 1..4068: mol_type = other RNA
agttccctatcactctctttaatcactactcacagtaacctcaactcctgccacaatgtttgtgttcctggtgctgctgccactggtgagctctcagtgcgtgaatctgaccacacggacccagctgcccccagcctacaccaactcttttacaaggggagtgtattaccctgacaaggtgtttagatccagcgtgctgcacagcacccaggacctgttcctgccattcttttccaatgtgacatggttccacgtgatcagcgggacaaatggcacaaagcggttcgacaaccccgtgctgcccttcaatgatggggtgtacttcgcctccatcgagaaaagcaacatcattcgcggctggatttttggaacaaccctggatagcaagacccagtctctgctgatcgtgaataacgccacaaatgtggtgatcaaggtgtgtgagttccagttttgtaatgatccatttctggaccacaagaacaataagagctggatggaatccgaatttcgggtgtactccagcgccaataactgtacattcgaatatgtgtctcagccattcctgatggatctggagggaaagcagggcaatttcaagaatctgcgcgagttcgtgttcaagaacattgacggatacttcaagatctattctaagcatacccccatcattgtgcgggaacctgaggatctgccacaggggttcagcgccctggaacctctggtggatctgccaattggaatcaatatcacacgcttccagaccctgctggccctgcaccgctcctacctgacacccggcgattctagctctgggtggaccgccggagccgccgcctactatgtgggatacctgcagccccgcaccttcctgctgaagtataatgaaaacggcaccattaccgacgccgtggactgtgccctggacccactgagcgaaaccaagtgcacactgaaatccttcaccgtggaaaaagggatctaccagaccagcaacttccgcgtgcagcctaccgaaagcattgtgcgctttcccaatattacaaacctgtgtccatttgacgaggtgttcaacgccacacgcttcgccagcgtgtatgcctggaaccggaaaagaatcagcaactgtgtggccgattacagcgtgctgtacaatctggccccatttttcaccttcaaatgttacggggtgagccctaccaagctgaacgatctgtgtttcaccaacgtgtatgccgattctttcgtgatccgcggggacgaggtgaggcagattgcccctggacagacaggaaatattgccgactataattataaactgcccgacgatttcaccgggtgcgtgattgcctggaactccaataaactggactccaaagtgagcgggaattataactacctgtataggctgttccgcaagtccaatctgaaaccattcgagcgggacatctccacagaaatttaccaggccgggaacaagccatgcaacggcgtggccggcttcaattgttattttccactgcgctcctactcttttcggccaacatatggggtggggcatcagccctacagggtggtggtgctgtcctttgaactgctgcatgcccctgccaccgtgtgcgggcctaagaaatctaccaacctggtgaagaataaatgcgtgaatttcaatttcaatgggctgaaagggacaggcgtgctgaccgaatccaataagaaatttctgccattccagcagtttgggagggacatcgccgacacaaccgacgccgtgagggatccacagaccctggaaatcctggatattacaccctgtagcttcggcggggtgtccgtgattacaccagggacaaatacatccaaccaggtggccgtgctgtatcagggcgtgaattgtaccgaagtgcccgtggccatccatgccgaccagctgacacctacctggagggtgtatagcaccggcagcaacgtgttccagacaagagccgggtgcctgattggcgccgagtacgtgaacaatagctatgaatgcgatatcccaatcggcgccgggatctgcgcctcctaccagacccagacaaagtcccacagacgggccagatctgtggcctcccagtctattatcgcctataccatgtctctgggcgccgagaacagcgtggcctattctaacaattctattgccattcccacaaatttcacaattagcgtgaccacagaaatcctgcccgtgtctatgacaaagacctccgtggattgtacaatgtatatttgtggcgacagcacagagtgcagcaacctgctgctgcagtacggctctttctgcacacagctgaaacgcgccctgacaggtattgccgtggagcaggataaaaacacacaggaagtgtttgcccaggtgaagcagatttacaaaacaccacccattaaatacttcggcggattcaacttctcccagatcctgcctgaccccagcaaaccttccaagagaagctttatcgaggacctgctgtttaacaaagtgaccctggccgatgccggatttatcaaacagtacggggactgcctgggcgatattgccgccagagatctgatctgtgcccagaaattcaaggggctgaccgtgctgcctcccctgctgaccgacgagatgatcgcccagtacaccagcgccctgctggccggcacaatcacctctggctggaccttcggcgccggcgccgccctgcagatcccatttgccatgcagatggcctacagatttaatgggatcggggtgacacagaacgtgctgtatgagaatcagaagctgattgccaatcagttcaacagcgccatcgggaagattcaggacagcctgtctagcacagcctctgccctgggcaagctgcaggatgtggtgaaccacaatgcccaggccctgaatacactggtgaagcagctgtcctctaagtttggggccatctcctctgtgctgaatgacatcttttctagactggatcctccagaagccgaggtgcagatcgaccgcctgattaccggacgcctgcagtctctgcagacctatgtgacacagcagctgattagggccgccgagattagggcctctgccaatctggccgccaccaaaatgtccgagtgtgtgctgggacagtccaagcgggtggatttttgtgggaaagggtaccatctgatgtccttcccccagagcgcccctcacggagtggtgttcctgcacgtgacctacgtgccagcccaggagaagaactttacaaccgccccagccatctgccacgatgggaaggcccacttcccccgcgaaggggtgttcgtgtctaatgggacccactggtttgtgacacagcgcaacttttacgaacctcagattatcacaaccgacaatacattcgtgtccgggaattgtgatgtggtgattggaattgtgaacaataccgtgtacgatcccctgcagcccgagctggactcttttaaagaggaactggataaatactttaagaaccacacctcccccgacgtggacctgggggacatttctggaattaatgccagcgtggtgaatattcagaaagagattgacaggctgaacgaggtggccaagaatctgaacgaaagcctgatcgacctgcaggaactgggaaagtatgaacagtacattaaatggccctggtacatctggctgggctttatcgccggcctgatcgccatcgtgatggtgaccattatgctgtgttgcatgacaagctgctgttcttgtctgaagggctgctgtagctgtgggagctgttgcaagttcgacgaggacgattccgaacccgtgctgaaaggagtgaagctgcactacacctgataattaagtgcttcccacttaaaacatatcaggccttctatttatttaaatatttaaattttatatttattgttgaatgtatggtttgctacctattgtaactattattcttaatcttaaaactataaatatggatcttttatgattctttttgtaagccctaggggctctaaaatggtttcacttatttatcccaaaat

SEQ ID NO: 39 - RNA, 4076 nt, synthetic construct
  source 1..4076: mol_type = other RNA
agttccctatcactctctttaatcactactcacagtaacctcaactcctgccacaatgtttgtgttcctggtgctgctgccactggtgagctctcagtgcgtgaatctgaccacacggacccagctgcccccagcctacaccaactcttttacaaggggagtgtattaccctgacaaggtgtttagatccagcgtgctgcacagcacccaggacctgttcctgccattcttttccaatgtgacatggttccacgtgatcagcgggacaaatggcacaaagcggttcgacaaccccgtgctgcccttcaatgatggggtgtacttcgcctccatcgagaaaagcaacatcattcgcggctggatttttggaacaaccctggatagcaagacccagtctctgctgatcgtgaataacgccacaaatgtggtgatcaaggtgtgtgagttccagttttgtaatgatccatttctggaccacaagaacaataagagctggatggaatccgaatttcgggtgtactccagcgccaataactgtacattcgaatatgtgtctcagccattcctgatggatctggagggaaagcagggcaatttcaagaatctgcgcgagttcgtgttcaagaacattgacggatacttcaagatctattctaagcatacccccatcattgtgcgggaacctgaggatctgccacaggggttcagcgccctggaacctctggtggatctgccaattggaatcaatatcacacgcttccagaccctgctggccctgcaccgctcctacctgacacccggcgattctagctctgggtggaccgccggagccgccgcctactatgtgggatacctgcagccccgcaccttcctgctgaagtataatgaaaacggcaccattaccgacgccgtggactgtgccctggacccactgagcgaaaccaagtgcacactgaaatccttcaccgtggaaaaagggatctaccagaccagcaacttccgcgtgcagcctaccgaaagcattgtgcgctttcccaatattacaaacctgtgtccatttgacgaggtgttcaacgccacacgcttcgccagcgtgtatgcctggaaccggaaaagaatcagcaactgtgtggccgattacagcgtgctgtacaatctggccccatttttcaccttcaaatgttacggggtgagccctaccaagctgaacgatctgtgtttcaccaacgtgtatgccgattctttcgtgatccgcggggacgaggtgaggcagattgcccctggacagacaggaaatattgccgactataattataaactgcccgacgatttcaccgggtgcgtgattgcctggaactccaataaactggactccaaagtgagcgggaattataactacctgtataggctgttccgcaagtccaatctgaaaccattcgagcgggacatctccacagaaatttaccaggccgggaacaagccatgcaacggcgtggccggcttcaattgttattttccactgcgctcctactcttttcggccaacatatggggtggggcatcagccctacagggtggtggtgctgtcctttgaactgctgcatgcccctgccaccgtgtgcgggcctaagaaatctaccaacctggtgaagaataaatgcgtgaatttcaatttcaatgggctgaaagggacaggcgtgctgaccgaatccaataagaaatttctgccattccagcagtttgggagggacatcgccgacacaaccgacgccgtgagggatccacagaccctggaaatcctggatattacaccctgtagcttcggcggggtgtccgtgattacaccagggacaaatacatccaaccaggtggccgtgctgtatcagggcgtgaattgtaccgaagtgcccgtggccatccatgccgaccagctgacacctacctggagggtgtatagcaccggcagcaacgtgttccagacaagagccgggtgcctgattggcgccgagtacgtgaacaatagctatgaatgcgatatcccaatcggcgccgggatctgcgcctcctaccagacccagacaaagtcccacagacgggccagatctgtggcctcccagtctattatcgcctataccatgtctctgggcgccgagaacagcgtggcctattctaacaattctattgccattcccacaaatttcacaattagcgtgaccacagaaatcctgcccgtgtctatgacaaagacctccgtggattgtacaatgtatatttgtggcgacagcacagagtgcagcaacctgctgctgcagtacggctctttctgcacacagctgaaacgcgccctgacaggtattgccgtggagcaggataaaaacacacaggaagtgtttgcccaggtgaagcagatttacaaaacaccacccattaaatacttcggcggattcaacttctcccagatcctgcctgaccccagcaaaccttccaagagaagctttatcgaggacctgctgtttaacaaagtgaccctggccgatgccggatttatcaaacagtacggggactgcctgggcgatattgccgccagagatctgatctgtgcccagaaattcaaggggctgaccgtgctgcctcccctgctgaccgacgagatgatcgcccagtacaccagcgccctgctggccggcacaatcacctctggctggaccttcggcgccggcgccgccctgcagatcccatttgccatgcagatggcctacagatttaatgggatcggggtgacacagaacgtgctgtatgagaatcagaagctgattgccaatcagttcaacagcgccatcgggaagattcaggacagcctgtctagcacagcctctgccctgggcaagctgcaggatgtggtgaaccacaatgcccaggccctgaatacactggtgaagcagctgtcctctaagtttggggccatctcctctgtgctgaatgacatcttttctagactggatcctccagaagccgaggtgcagatcgaccgcctgattaccggacgcctgcagtctctgcagacctatgtgacacagcagctgattagggccgccgagattagggcctctgccaatctggccgccaccaaaatgtccgagtgtgtgctgggacagtccaagcgggtggatttttgtgggaaagggtaccatctgatgtccttcccccagagcgcccctcacggagtggtgttcctgcacgtgacctacgtgccagcccaggagaagaactttacaaccgccccagccatctgccacgatgggaaggcccacttcccccgcgaaggggtgttcgtgtctaatgggacccactggtttgtgacacagcgcaacttttacgaacctcagattatcacaaccgacaatacattcgtgtccgggaattgtgatgtggtgattggaattgtgaacaataccgtgtacgatcccctgcagcccgagctggactcttttaaagaggaactggataaatactttaagaaccacacctcccccgacgtggacctgggggacatttctggaattaatgccagcgtggtgaatattcagaaagagattgacaggctgaacgaggtggccaagaatctgaacgaaagcctgatcgacctgcaggaactgggaaagtatgaacagtacattaaatggccctggtacatctggctgggctttatcgccggcctgatcgccatcgtgatggtgaccattatgctgtgttgcatgacaagctgctgttcttgtctgaagggctgctgtagctgtgggagctgttgcaagttcgacgaggacgattccgaacccgtgctgaaaggagtgaagctgcactacacctgataattaagtgcttcccacttaaaacatatcaggccttctatttatttaaatatttaaattttatatttattgttgaatgtatggtttgctacctattgtaactattattcttaatcttaaaactataaatatggatcttttatgattctttttgtaagccctaggggctctaaaatggtttcacttatttatcccaaaatttcattgc

SEQ ID NO: 40 - RNA, 4203 nt, synthetic construct
  source 1..4203: mol_type = other RNA
aggagttccctatcactctctttaatcactactcacagtaacctcaactcctgccacaatgtttgtgttcctggtgctgctgccactggtgagctctcagtgcgtgaatctgaccacacggacccagctgcccccagcctacaccaactcttttacaaggggagtgtattaccctgacaaggtgtttagatccagcgtgctgcacagcacccaggacctgttcctgccattcttttccaatgtgacatggttccacgtgatcagcgggacaaatggcacaaagcggttcgacaaccccgtgctgcccttcaatgatggggtgtacttcgcctccatcgagaaaagcaacatcattcgcggctggatttttggaacaaccctggatagcaagacccagtctctgctgatcgtgaataacgccacaaatgtggtgatcaaggtgtgtgagttccagttttgtaatgatccatttctggaccacaagaacaataagagctggatggaatccgaatttcgggtgtactccagcgccaataactgtacattcgaatatgtgtctcagccattcctgatggatctggagggaaagcagggcaatttcaagaatctgcgcgagttcgtgttcaagaacattgacggatacttcaagatctattctaagcatacccccatcattgtgcgggaacctgaggatctgccacaggggttcagcgccctggaacctctggtggatctgccaattggaatcaatatcacacgcttccagaccctgctggccctgcaccgctcctacctgacacccggcgattctagctctgggtggaccgccggagccgccgcctactatgtgggatacctgcagccccgcaccttcctgctgaagtataatgaaaacggcaccattaccgacgccgtggactgtgccctggacccactgagcgaaaccaagtgcacactgaaatccttcaccgtggaaaaagggatctaccagaccagcaacttccgcgtgcagcctaccgaaagcattgtgcgctttcccaatattacaaacctgtgtccatttgacgaggtgttcaacgccacacgcttcgccagcgtgtatgcctggaaccggaaaagaatcagcaactgtgtggccgattacagcgtgctgtacaatctggccccatttttcaccttcaaatgttacggggtgagccctaccaagctgaacgatctgtgtttcaccaacgtgtatgccgattctttcgtgatccgcggggacgaggtgaggcagattgcccctggacagacaggaaatattgccgactataattataaactgcccgacgatttcaccgggtgcgtgattgcctggaactccaataaactggactccaaagtgagcgggaattataactacctgtataggctgttccgcaagtccaatctgaaaccattcgagcgggacatctccacagaaatttaccaggccgggaacaagccatgcaacggcgtggccggcttcaattgttattttccactgcgctcctactcttttcggccaacatatggggtggggcatcagccctacagggtggtggtgctgtcctttgaactgctgcatgcccctgccaccgtgtgcgggcctaagaaatctaccaacctggtgaagaataaatgcgtgaatttcaatttcaatgggctgaaagggacaggcgtgctgaccgaatccaataagaaatttctgccattccagcagtttgggagggacatcgccgacacaaccgacgccgtgagggatccacagaccctggaaatcctggatattacaccctgtagcttcggcggggtgtccgtgattacaccagggacaaatacatccaaccaggtggccgtgctgtatcagggcgtgaattgtaccgaagtgcccgtggccatccatgccgaccagctgacacctacctggagggtgtatagcaccggcagcaacgtgttccagacaagagccgggtgcctgattggcgccgagtacgtgaacaatagctatgaatgcgatatcccaatcggcgccgggatctgcgcctcctaccagacccagacaaagtcccacagacgggccagatctgtggcctcccagtctattatcgcctataccatgtctctgggcgccgagaacagcgtggcctattctaacaattctattgccattcccacaaatttcacaattagcgtgaccacagaaatcctgcccgtgtctatgacaaagacctccgtggattgtacaatgtatatttgtggcgacagcacagagtgcagcaacctgctgctgcagtacggctctttctgcacacagctgaaacgcgccctgacaggtattgccgtggagcaggataaaaacacacaggaagtgtttgcccaggtgaagcagatttacaaaacaccacccattaaatacttcggcggattcaacttctcccagatcctgcctgaccccagcaaaccttccaagagaagctttatcgaggacctgctgtttaacaaagtgaccctggccgatgccggatttatcaaacagtacggggactgcctgggcgatattgccgccagagatctgatctgtgcccagaaattcaaggggctgaccgtgctgcctcccctgctgaccgacgagatgatcgcccagtacaccagcgccctgctggccggcacaatcacctctggctggaccttcggcgccggcgccgccctgcagatcccatttgccatgcagatggcctacagatttaatgggatcggggtgacacagaacgtgctgtatgagaatcagaagctgattgccaatcagttcaacagcgccatcgggaagattcaggacagcctgtctagcacagcctctgccctgggcaagctgcaggatgtggtgaaccacaatgcccaggccctgaatacactggtgaagcagctgtcctctaagtttggggccatctcctctgtgctgaatgacatcttttctagactggatcctccagaagccgaggtgcagatcgaccgcctgattaccggacgcctgcagtctctgcagacctatgtgacacagcagctgattagggccgccgagattagggcctctgccaatctggccgccaccaaaatgtccgagtgtgtgctgggacagtccaagcgggtggatttttgtgggaaagggtaccatctgatgtccttcccccagagcgcccctcacggagtggtgttcctgcacgtgacctacgtgccagcccaggagaagaactttacaaccgccccagccatctgccacgatgggaaggcccacttcccccgcgaaggggtgttcgtgtctaatgggacccactggtttgtgacacagcgcaacttttacgaacctcagattatcacaaccgacaatacattcgtgtccgggaattgtgatgtggtgattggaattgtgaacaataccgtgtacgatcccctgcagcccgagctggactcttttaaagaggaactggataaatactttaagaaccacacctcccccgacgtggacctgggggacatttctggaattaatgccagcgtggtgaatattcagaaagagattgacaggctgaacgaggtggccaagaatctgaacgaaagcctgatcgacctgcaggaactgggaaagtatgaacagtacattaaatggccctggtacatctggctgggctttatcgccggcctgatcgccatcgtgatggtgaccattatgctgtgttgcatgacaagctgctgttcttgtctgaagggctgctgtagctgtgggagctgttgcaagttcgacgaggacgattccgaacccgtgctgaaaggagtgaagctgcactacacctgataattaagtgcttcccacttaaaacatatcaggccttctatttatttaaatatttaaattttatatttattgttgaatgtatggtttgctacctattgtaactattattcttaatcttaaaactataaatatggatcttttatgattctttttgtaagccctaggggctctaaaatggtttcacttatttatcccaaaatttcattgcaaaaaaaaaaaaaaaaaaaaaaaaaaaaaagcatatgactaaaaaaaaaaaaaaaaaaaaaaaaaaaaaaaaaaaaaaaaaaaaaaaaaaaaaaaaaaaaaaaaaaaaaaaaaaaaaaaaaaaa

SEQ ID NO: 41 - RNA, 4164 nt, synthetic construct
  source 1..4164: mol_type = other RNA
agaataaactagtattcttctggtccccacagactcagagagaacccgccaccatgtttgtgttcctggtgctgctgccactggtgagctctcagtgcgtgaatctgaccacacggacccagctgcccccagcctacaccaactcttttacaaggggagtgtattaccctgacaaggtgtttagatccagcgtgctgcacagcacccaggacctgttcctgccattcttttccaatgtgacatggttccacgtgatcagcgggacaaatggcacaaagcggttcgacaaccccgtgctgcccttcaatgatggggtgtacttcgcctccatcgagaaaagcaacatcattcgcggctggatttttggaacaaccctggatagcaagacccagtctctgctgatcgtgaataacgccacaaatgtggtgatcaaggtgtgtgagttccagttttgtaatgatccatttctggaccacaagaacaataagagctggatggaatccgaatttcgggtgtactccagcgccaataactgtacattcgaatatgtgtctcagccattcctgatggatctggagggaaagcagggcaatttcaagaatctgcgcgagttcgtgttcaagaacattgacggatacttcaagatctattctaagcatacccccatcattgtgcgggaacctgaggatctgccacaggggttcagcgccctggaacctctggtggatctgccaattggaatcaatatcacacgcttccagaccctgctggccctgcaccgctcctacctgacacccggcgattctagctctgggtggaccgccggagccgccgcctactatgtgggatacctgcagccccgcaccttcctgctgaagtataatgaaaacggcaccattaccgacgccgtggactgtgccctggacccactgagcgaaaccaagtgcacactgaaatccttcaccgtggaaaaagggatctaccagaccagcaacttccgcgtgcagcctaccgaaagcattgtgcgctttcccaatattacaaacctgtgtccatttgacgaggtgttcaacgccacacgcttcgccagcgtgtatgcctggaaccggaaaagaatcagcaactgtgtggccgattacagcgtgctgtacaatctggccccatttttcaccttcaaatgttacggggtgagccctaccaagctgaacgatctgtgtttcaccaacgtgtatgccgattctttcgtgatccgcggggacgaggtgaggcagattgcccctggacagacaggaaatattgccgactataattataaactgcccgacgatttcaccgggtgcgtgattgcctggaactccaataaactggactccaaagtgagcgggaattataactacctgtataggctgttccgcaagtccaatctgaaaccattcgagcgggacatctccacagaaatttaccaggccgggaacaagccatgcaacggcgtggccggcttcaattgttattttccactgcgctcctactcttttcggccaacatatggggtggggcatcagccctacagggtggtggtgctgtcctttgaactgctgcatgcccctgccaccgtgtgcgggcctaagaaatctaccaacctggtgaagaataaatgcgtgaatttcaatttcaatgggctgaaagggacaggcgtgctgaccgaatccaataagaaatttctgccattccagcagtttgggagggacatcgccgacacaaccgacgccgtgagggatccacagaccctggaaatcctggatattacaccctgtagcttcggcggggtgtccgtgattacaccagggacaaatacatccaaccaggtggccgtgctgtatcagggcgtgaattgtaccgaagtgcccgtggccatccatgccgaccagctgacacctacctggagggtgtatagcaccggcagcaacgtgttccagacaagagccgggtgcctgattggcgccgagtacgtgaacaatagctatgaatgcgatatcccaatcggcgccgggatctgcgcctcctaccagacccagacaaagtcccacagacgggccagatctgtggcctcccagtctattatcgcctataccatgtctctgggcgccgagaacagcgtggcctattctaacaattctattgccattcccacaaatttcacaattagcgtgaccacagaaatcctgcccgtgtctatgacaaagacctccgtggattgtacaatgtatatttgtggcgacagcacagagtgcagcaacctgctgctgcagtacggctctttctgcacacagctgaaacgcgccctgacaggtattgccgtggagcaggataaaaacacacaggaagtgtttgcccaggtgaagcagatttacaaaacaccacccattaaatacttcggcggattcaacttctcccagatcctgcctgaccccagcaaaccttccaagagaagctttatcgaggacctgctgtttaacaaagtgaccctggccgatgccggatttatcaaacagtacggggactgcctgggcgatattgccgccagagatctgatctgtgcccagaaattcaaggggctgaccgtgctgcctcccctgctgaccgacgagatgatcgcccagtacaccagcgccctgctggccggcacaatcacctctggctggaccttcggcgccggcgccgccctgcagatcccatttgccatgcagatggcctacagatttaatgggatcggggtgacacagaacgtgctgtatgagaatcagaagctgattgccaatcagttcaacagcgccatcgggaagattcaggacagcctgtctagcacagcctctgccctgggcaagctgcaggatgtggtgaaccacaatgcccaggccctgaatacactggtgaagcagctgtcctctaagtttggggccatctcctctgtgctgaatgacatcttttctagactggatcctccagaagccgaggtgcagatcgaccgcctgattaccggacgcctgcagtctctgcagacctatgtgacacagcagctgattagggccgccgagattagggcctctgccaatctggccgccaccaaaatgtccgagtgtgtgctgggacagtccaagcgggtggatttttgtgggaaagggtaccatctgatgtccttcccccagagcgcccctcacggagtggtgttcctgcacgtgacctacgtgccagcccaggagaagaactttacaaccgccccagccatctgccacgatgggaaggcccacttcccccgcgaaggggtgttcgtgtctaatgggacccactggtttgtgacacagcgcaacttttacgaacctcagattatcacaaccgacaatacattcgtgtccgggaattgtgatgtggtgattggaattgtgaacaataccgtgtacgatcccctgcagcccgagctggactcttttaaagaggaactggataaatactttaagaaccacacctcccccgacgtggacctgggggacatttctggaattaatgccagcgtggtgaatattcagaaagagattgacaggctgaacgaggtggccaagaatctgaacgaaagcctgatcgacctgcaggaactgggaaagtatgaacagtacattaaatggccctggtacatctggctgggctttatcgccggcctgatcgccatcgtgatggtgaccattatgctgtgttgcatgacaagctgctgttcttgtctgaagggctgctgtagctgtgggagctgttgcaagttcgacgaggacgattccgaacccgtgctgaaaggagtgaagctgcactacacctgataactcgagctggtactgcatgcacacaatgctagctgcccctttcccgtcctgggtaccccgagtctcccccgacctcgggtcccaggtatgctcccacctccacctgccccactcaccacctctgctagttccagacacctcccaagcacgcaacaatgcagctcaaaacgcttagcctagccacacccccacgggaaacagcagtgattaacctttagcaataaacgaaagtttaactaagctatactaaccccagggttggtcaatttcgtgccagccacaccctggagctagc

SEQ ID NO: 42 - RNA, 4298 nt, synthetic construct
  source 1..4298: mol_type = other RNA
agagaataaactagtattcttctggtccccacagactcagagagaacccgccaccatgtttgtgttcctggtgctgctgccactggtgagctctcagtgcgtgaatctgaccacacggacccagctgcccccagcctacaccaactcttttacaaggggagtgtattaccctgacaaggtgtttagatccagcgtgctgcacagcacccaggacctgttcctgccattcttttccaatgtgacatggttccacgtgatcagcgggacaaatggcacaaagcggttcgacaaccccgtgctgcccttcaatgatggggtgtacttcgcctccatcgagaaaagcaacatcattcgcggctggatttttggaacaaccctggatagcaagacccagtctctgctgatcgtgaataacgccacaaatgtggtgatcaaggtgtgtgagttccagttttgtaatgatccatttctggaccacaagaacaataagagctggatggaatccgaatttcgggtgtactccagcgccaataactgtacattcgaatatgtgtctcagccattcctgatggatctggagggaaagcagggcaatttcaagaatctgcgcgagttcgtgttcaagaacattgacggatacttcaagatctattctaagcatacccccatcattgtgcgggaacctgaggatctgccacaggggttcagcgccctggaacctctggtggatctgccaattggaatcaatatcacacgcttccagaccctgctggccctgcaccgctcctacctgacacccggcgattctagctctgggtggaccgccggagccgccgcctactatgtgggatacctgcagccccgcaccttcctgctgaagtataatgaaaacggcaccattaccgacgccgtggactgtgccctggacccactgagcgaaaccaagtgcacactgaaatccttcaccgtggaaaaagggatctaccagaccagcaacttccgcgtgcagcctaccgaaagcattgtgcgctttcccaatattacaaacctgtgtccatttgacgaggtgttcaacgccacacgcttcgccagcgtgtatgcctggaaccggaaaagaatcagcaactgtgtggccgattacagcgtgctgtacaatctggccccatttttcaccttcaaatgttacggggtgagccctaccaagctgaacgatctgtgtttcaccaacgtgtatgccgattctttcgtgatccgcggggacgaggtgaggcagattgcccctggacagacaggaaatattgccgactataattataaactgcccgacgatttcaccgggtgcgtgattgcctggaactccaataaactggactccaaagtgagcgggaattataactacctgtataggctgttccgcaagtccaatctgaaaccattcgagcgggacatctccacagaaatttaccaggccgggaacaagccatgcaacggcgtggccggcttcaattgttattttccactgcgctcctactcttttcggccaacatatggggtggggcatcagccctacagggtggtggtgctgtcctttgaactgctgcatgcccctgccaccgtgtgcgggcctaagaaatctaccaacctggtgaagaataaatgcgtgaatttcaatttcaatgggctgaaagggacaggcgtgctgaccgaatccaataagaaatttctgccattccagcagtttgggagggacatcgccgacacaaccgacgccgtgagggatccacagaccctggaaatcctggatattacaccctgtagcttcggcggggtgtccgtgattacaccagggacaaatacatccaaccaggtggccgtgctgtatcagggcgtgaattgtaccgaagtgcccgtggccatccatgccgaccagctgacacctacctggagggtgtatagcaccggcagcaacgtgttccagacaagagccgggtgcctgattggcgccgagtacgtgaacaatagctatgaatgcgatatcccaatcggcgccgggatctgcgcctcctaccagacccagacaaagtcccacagacgggccagatctgtggcctcccagtctattatcgcctataccatgtctctgggcgccgagaacagcgtggcctattctaacaattctattgccattcccacaaatttcacaattagcgtgaccacagaaatcctgcccgtgtctatgacaaagacctccgtggattgtacaatgtatatttgtggcgacagcacagagtgcagcaacctgctgctgcagtacggctctttctgcacacagctgaaacgcgccctgacaggtattgccgtggagcaggataaaaacacacaggaagtgtttgcccaggtgaagcagatttacaaaacaccacccattaaatacttcggcggattcaacttctcccagatcctgcctgaccccagcaaaccttccaagagaagctttatcgaggacctgctgtttaacaaagtgaccctggccgatgccggatttatcaaacagtacggggactgcctgggcgatattgccgccagagatctgatctgtgcccagaaattcaaggggctgaccgtgctgcctcccctgctgaccgacgagatgatcgcccagtacaccagcgccctgctggccggcacaatcacctctggctggaccttcggcgccggcgccgccctgcagatcccatttgccatgcagatggcctacagatttaatgggatcggggtgacacagaacgtgctgtatgagaatcagaagctgattgccaatcagttcaacagcgccatcgggaagattcaggacagcctgtctagcacagcctctgccctgggcaagctgcaggatgtggtgaaccacaatgcccaggccctgaatacactggtgaagcagctgtcctctaagtttggggccatctcctctgtgctgaatgacatcttttctagactggatcctccagaagccgaggtgcagatcgaccgcctgattaccggacgcctgcagtctctgcagacctatgtgacacagcagctgattagggccgccgagattagggcctctgccaatctggccgccaccaaaatgtccgagtgtgtgctgggacagtccaagcgggtggatttttgtgggaaagggtaccatctgatgtccttcccccagagcgcccctcacggagtggtgttcctgcacgtgacctacgtgccagcccaggagaagaactttacaaccgccccagccatctgccacgatgggaaggcccacttcccccgcgaaggggtgttcgtgtctaatgggacccactggtttgtgacacagcgcaacttttacgaacctcagattatcacaaccgacaatacattcgtgtccgggaattgtgatgtggtgattggaattgtgaacaataccgtgtacgatcccctgcagcccgagctggactcttttaaagaggaactggataaatactttaagaaccacacctcccccgacgtggacctgggggacatttctggaattaatgccagcgtggtgaatattcagaaagagattgacaggctgaacgaggtggccaagaatctgaacgaaagcctgatcgacctgcaggaactgggaaagtatgaacagtacattaaatggccctggtacatctggctgggctttatcgccggcctgatcgccatcgtgatggtgaccattatgctgtgttgcatgacaagctgctgttcttgtctgaagggctgctgtagctgtgggagctgttgcaagttcgacgaggacgattccgaacccgtgctgaaaggagtgaagctgcactacacctgataactcgagctggtactgcatgcacacaatgctagctgcccctttcccgtcctgggtaccccgagtctcccccgacctcgggtcccaggtatgctcccacctccacctgccccactcaccacctctgctagttccagacacctcccaagcacgcaacaatgcagctcaaaacgcttagcctagccacacccccacgggaaacagcagtgattaacctttagcaataaacgaaagtttaactaagctatactaaccccagggttggtcaatttcgtgccagccacaccctggagctagcttcattgcaaaaaaaaaaaaaaaaaaaaaaaaaaaaaagcatatgactaaaaaaaaaaaaaaaaaaaaaaaaaaaaaaaaaaaaaaaaaaaaaaaaaaaaaaaaaaaaaaaaaaaaaaaaaaaaaaaaaaaa

SEQ ID NO: 43 - RNA, 4105 nt, synthetic construct
  source 1..4105: mol_type = other RNA
gggaaataagagagaaaagaagagtaagaagaaatataagagccaccatgtttgtgttcctggtgctgctgccactggtgagctctcagtgcgtgaatctgaccacacggacccagctgcccccagcctacaccaactcttttacaaggggagtgtattaccctgacaaggtgtttagatccagcgtgctgcacagcacccaggacctgttcctgccattcttttccaatgtgacatggttccacgtgatcagcgggacaaatggcacaaagcggttcgacaaccccgtgctgcccttcaatgatggggtgtacttcgcctccatcgagaaaagcaacatcattcgcggctggatttttggaacaaccctggatagcaagacccagtctctgctgatcgtgaataacgccacaaatgtggtgatcaaggtgtgtgagttccagttttgtaatgatccatttctggaccacaagaacaataagagctggatggaatccgaatttcgggtgtactccagcgccaataactgtacattcgaatatgtgtctcagccattcctgatggatctggagggaaagcagggcaatttcaagaatctgcgcgagttcgtgttcaagaacattgacggatacttcaagatctattctaagcatacccccatcattgtgcgggaacctgaggatctgccacaggggttcagcgccctggaacctctggtggatctgccaattggaatcaatatcacacgcttccagaccctgctggccctgcaccgctcctacctgacacccggcgattctagctctgggtggaccgccggagccgccgcctactatgtgggatacctgcagccccgcaccttcctgctgaagtataatgaaaacggcaccattaccgacgccgtggactgtgccctggacccactgagcgaaaccaagtgcacactgaaatccttcaccgtggaaaaagggatctaccagaccagcaacttccgcgtgcagcctaccgaaagcattgtgcgctttcccaatattacaaacctgtgtccatttgacgaggtgttcaacgccacacgcttcgccagcgtgtatgcctggaaccggaaaagaatcagcaactgtgtggccgattacagcgtgctgtacaatctggccccatttttcaccttcaaatgttacggggtgagccctaccaagctgaacgatctgtgtttcaccaacgtgtatgccgattctttcgtgatccgcggggacgaggtgaggcagattgcccctggacagacaggaaatattgccgactataattataaactgcccgacgatttcaccgggtgcgtgattgcctggaactccaataaactggactccaaagtgagcgggaattataactacctgtataggctgttccgcaagtccaatctgaaaccattcgagcgggacatctccacagaaatttaccaggccgggaacaagccatgcaacggcgtggccggcttcaattgttattttccactgcgctcctactcttttcggccaacatatggggtggggcatcagccctacagggtggtggtgctgtcctttgaactgctgcatgcccctgccaccgtgtgcgggcctaagaaatctaccaacctggtgaagaataaatgcgtgaatttcaatttcaatgggctgaaagggacaggcgtgctgaccgaatccaataagaaatttctgccattccagcagtttgggagggacatcgccgacacaaccgacgccgtgagggatccacagaccctggaaatcctggatattacaccctgtagcttcggcggggtgtccgtgattacaccagggacaaatacatccaaccaggtggccgtgctgtatcagggcgtgaattgtaccgaagtgcccgtggccatccatgccgaccagctgacacctacctggagggtgtatagcaccggcagcaacgtgttccagacaagagccgggtgcctgattggcgccgagtacgtgaacaatagctatgaatgcgatatcccaatcggcgccgggatctgcgcctcctaccagacccagacaaagtcccacagacgggccagatctgtggcctcccagtctattatcgcctataccatgtctctgggcgccgagaacagcgtggcctattctaacaattctattgccattcccacaaatttcacaattagcgtgaccacagaaatcctgcccgtgtctatgacaaagacctccgtggattgtacaatgtatatttgtggcgacagcacagagtgcagcaacctgctgctgcagtacggctctttctgcacacagctgaaacgcgccctgacaggtattgccgtggagcaggataaaaacacacaggaagtgtttgcccaggtgaagcagatttacaaaacaccacccattaaatacttcggcggattcaacttctcccagatcctgcctgaccccagcaaaccttccaagagaagctttatcgaggacctgctgtttaacaaagtgaccctggccgatgccggatttatcaaacagtacggggactgcctgggcgatattgccgccagagatctgatctgtgcccagaaattcaaggggctgaccgtgctgcctcccctgctgaccgacgagatgatcgcccagtacaccagcgccctgctggccggcacaatcacctctggctggaccttcggcgccggcgccgccctgcagatcccatttgccatgcagatggcctacagatttaatgggatcggggtgacacagaacgtgctgtatgagaatcagaagctgattgccaatcagttcaacagcgccatcgggaagattcaggacagcctgtctagcacagcctctgccctgggcaagctgcaggatgtggtgaaccacaatgcccaggccctgaatacactggtgaagcagctgtcctctaagtttggggccatctcctctgtgctgaatgacatcttttctagactggatcctccagaagccgaggtgcagatcgaccgcctgattaccggacgcctgcagtctctgcagacctatgtgacacagcagctgattagggccgccgagattagggcctctgccaatctggccgccaccaaaatgtccgagtgtgtgctgggacagtccaagcgggtggatttttgtgggaaagggtaccatctgatgtccttcccccagagcgcccctcacggagtggtgttcctgcacgtgacctacgtgccagcccaggagaagaactttacaaccgccccagccatctgccacgatgggaaggcccacttcccccgcgaaggggtgttcgtgtctaatgggacccactggtttgtgacacagcgcaacttttacgaacctcagattatcacaaccgacaatacattcgtgtccgggaattgtgatgtggtgattggaattgtgaacaataccgtgtacgatcccctgcagcccgagctggactcttttaaagaggaactggataaatactttaagaaccacacctcccccgacgtggacctgggggacatttctggaattaatgccagcgtggtgaatattcagaaagagattgacaggctgaacgaggtggccaagaatctgaacgaaagcctgatcgacctgcaggaactgggaaagtatgaacagtacattaaatggccctggtacatctggctgggctttatcgccggcctgatcgccatcgtgatggtgaccattatgctgtgttgcatgacaagctgctgttcttgtctgaagggctgctgtagctgtgggagctgttgcaagttcgacgaggacgattccgaacccgtgctgaaaggagtgaagctgcactacacctgataagctggagcctcggtggcctagcttcttgccccttgggcctccccccagcccctcctccccttcctgcacccgtacccccgtggtctttgaataaagtctgagtgggcggcttcattgcaaaaaaaaaaaaaaaaaaaaaaaaaaaaaagcatatgactaaaaaaaaaaaaaaaaaaaaaaaaaaaaaaaaaaaaaaaaaaaaaaaaaaaaaaaaaaaaaaaaaaaaaaaaaaaaaaaaaaaa

SEQ ID NO: 44 - RNA, 4106 nt, synthetic construct
  source 1..4106: mol_type = other RNA
agggaaataagagagaaaagaagagtaagaagaaatataagagccaccatgtttgtgttcctggtgctgctgccactggtgagctctcagtgcgtgaatctgaccacacggacccagctgcccccagcctacaccaactcttttacaaggggagtgtattaccctgacaaggtgtttagatccagcgtgctgcacagcacccaggacctgttcctgccattcttttccaatgtgacatggttccacgtgatcagcgggacaaatggcacaaagcggttcgacaaccccgtgctgcccttcaatgatggggtgtacttcgcctccatcgagaaaagcaacatcattcgcggctggatttttggaacaaccctggatagcaagacccagtctctgctgatcgtgaataacgccacaaatgtggtgatcaaggtgtgtgagttccagttttgtaatgatccatttctggaccacaagaacaataagagctggatggaatccgaatttcgggtgtactccagcgccaataactgtacattcgaatatgtgtctcagccattcctgatggatctggagggaaagcagggcaatttcaagaatctgcgcgagttcgtgttcaagaacattgacggatacttcaagatctattctaagcatacccccatcattgtgcgggaacctgaggatctgccacaggggttcagcgccctggaacctctggtggatctgccaattggaatcaatatcacacgcttccagaccctgctggccctgcaccgctcctacctgacacccggcgattctagctctgggtggaccgccggagccgccgcctactatgtgggatacctgcagccccgcaccttcctgctgaagtataatgaaaacggcaccattaccgacgccgtggactgtgccctggacccactgagcgaaaccaagtgcacactgaaatccttcaccgtggaaaaagggatctaccagaccagcaacttccgcgtgcagcctaccgaaagcattgtgcgctttcccaatattacaaacctgtgtccatttgacgaggtgttcaacgccacacgcttcgccagcgtgtatgcctggaaccggaaaagaatcagcaactgtgtggccgattacagcgtgctgtacaatctggccccatttttcaccttcaaatgttacggggtgagccctaccaagctgaacgatctgtgtttcaccaacgtgtatgccgattctttcgtgatccgcggggacgaggtgaggcagattgcccctggacagacaggaaatattgccgactataattataaactgcccgacgatttcaccgggtgcgtgattgcctggaactccaataaactggactccaaagtgagcgggaattataactacctgtataggctgttccgcaagtccaatctgaaaccattcgagcgggacatctccacagaaatttaccaggccgggaacaagccatgcaacggcgtggccggcttcaattgttattttccactgcgctcctactcttttcggccaacatatggggtggggcatcagccctacagggtggtggtgctgtcctttgaactgctgcatgcccctgccaccgtgtgcgggcctaagaaatctaccaacctggtgaagaataaatgcgtgaatttcaatttcaatgggctgaaagggacaggcgtgctgaccgaatccaataagaaatttctgccattccagcagtttgggagggacatcgccgacacaaccgacgccgtgagggatccacagaccctggaaatcctggatattacaccctgtagcttcggcggggtgtccgtgattacaccagggacaaatacatccaaccaggtggccgtgctgtatcagggcgtgaattgtaccgaagtgcccgtggccatccatgccgaccagctgacacctacctggagggtgtatagcaccggcagcaacgtgttccagacaagagccgggtgcctgattggcgccgagtacgtgaacaatagctatgaatgcgatatcccaatcggcgccgggatctgcgcctcctaccagacccagacaaagtcccacagacgggccagatctgtggcctcccagtctattatcgcctataccatgtctctgggcgccgagaacagcgtggcctattctaacaattctattgccattcccacaaatttcacaattagcgtgaccacagaaatcctgcccgtgtctatgacaaagacctccgtggattgtacaatgtatatttgtggcgacagcacagagtgcagcaacctgctgctgcagtacggctctttctgcacacagctgaaacgcgccctgacaggtattgccgtggagcaggataaaaacacacaggaagtgtttgcccaggtgaagcagatttacaaaacaccacccattaaatacttcggcggattcaacttctcccagatcctgcctgaccccagcaaaccttccaagagaagctttatcgaggacctgctgtttaacaaagtgaccctggccgatgccggatttatcaaacagtacggggactgcctgggcgatattgccgccagagatctgatctgtgcccagaaattcaaggggctgaccgtgctgcctcccctgctgaccgacgagatgatcgcccagtacaccagcgccctgctggccggcacaatcacctctggctggaccttcggcgccggcgccgccctgcagatcccatttgccatgcagatggcctacagatttaatgggatcggggtgacacagaacgtgctgtatgagaatcagaagctgattgccaatcagttcaacagcgccatcgggaagattcaggacagcctgtctagcacagcctctgccctgggcaagctgcaggatgtggtgaaccacaatgcccaggccctgaatacactggtgaagcagctgtcctctaagtttggggccatctcctctgtgctgaatgacatcttttctagactggatcctccagaagccgaggtgcagatcgaccgcctgattaccggacgcctgcagtctctgcagacctatgtgacacagcagctgattagggccgccgagattagggcctctgccaatctggccgccaccaaaatgtccgagtgtgtgctgggacagtccaagcgggtggatttttgtgggaaagggtaccatctgatgtccttcccccagagcgcccctcacggagtggtgttcctgcacgtgacctacgtgccagcccaggagaagaactttacaaccgccccagccatctgccacgatgggaaggcccacttcccccgcgaaggggtgttcgtgtctaatgggacccactggtttgtgacacagcgcaacttttacgaacctcagattatcacaaccgacaatacattcgtgtccgggaattgtgatgtggtgattggaattgtgaacaataccgtgtacgatcccctgcagcccgagctggactcttttaaagaggaactggataaatactttaagaaccacacctcccccgacgtggacctgggggacatttctggaattaatgccagcgtggtgaatattcagaaagagattgacaggctgaacgaggtggccaagaatctgaacgaaagcctgatcgacctgcaggaactgggaaagtatgaacagtacattaaatggccctggtacatctggctgggctttatcgccggcctgatcgccatcgtgatggtgaccattatgctgtgttgcatgacaagctgctgttcttgtctgaagggctgctgtagctgtgggagctgttgcaagttcgacgaggacgattccgaacccgtgctgaaaggagtgaagctgcactacacctgataagctggagcctcggtggcctagcttcttgccccttgggcctccccccagcccctcctccccttcctgcacccgtacccccgtggtctttgaataaagtctgagtgggcggcttcattgcaaaaaaaaaaaaaaaaaaaaaaaaaaaaaagcatatgactaaaaaaaaaaaaaaaaaaaaaaaaaaaaaaaaaaaaaaaaaaaaaaaaaaaaaaaaaaaaaaaaaaaaaaaaaaaaaaaaaaaa

SEQ ID NO: 45 - RNA, 4307 nt, synthetic construct
  source 1..4307: mol_type = other RNA
agaacgcccccaaaatctgtttctaattttacagaaatcttttgaaacttggcacggtattcaaaagtccgtggaaagaaaaaaaccttgtcctggcttcagcttccaactacaaagacagacttggtccttttcaacggttttcacagatccagtgacccacgctctgaagacagaattagctaactttcaaaaacatctggaaaaatgtttgtgttcctggtgctgctgcccctggtcagcagccagtgcgtgaacctgaccacacgcacccagctgccccccgcctacaccaacagcttcaccaggggggtctactaccccgacaaggtgttcagatccagcgtgctgcacagcacccaggacctgttcctgccattcttctccaacgtgacatggttccacgtgatcagcgggaccaacggcacaaagcggttcgacaaccccgtgctgccattcaacgacggggtgtacttcgcctcaatcgagaaaagcaacatcatccgcggctggatcttcggcacaaccctcgacagcaagacccagtccctgctcatcgtgaacaacgccaccaacgtggtcatcaaggtctgcgagttccagttctgcaacgacccattcctggaccacaaaaacaacaagtcctggatggagtccgagttccgggtctactccagcgccaacaactgcaccttcgagtacgtgtctcagcccttcctgatggacctggagggaaagcagggcaacttcaagaacctgcgcgagttcgtcttcaagaacatcgacgggtacttcaaaatctacagcaagcacacccccatcatcgtgcgggagcccgaggacctgccccagggattcagcgccctggagccactggtggacctgccaatcggcatcaacatcacaaggttccagaccctgctggccctccacaggagctacctgacacccggcgacagcagctccggctggaccgccggggcagccgcctactacgtaggctacctgcagccaaggaccttcctgctgaaatacaacgagaacggcacaatcaccgacgccgtggactgcgccctggaccccctgagcgagaccaaatgcaccctgaaaagcttcaccgtggaaaaggggatctaccagaccagcaacttcagggtgcagcccaccgagagcatcgtgcgcttccccaacatcacaaacctgtgcccattcgacgaggtgttcaacgccacacgcttcgccagcgtgtacgcctggaaccggaaacgcatcagcaactgcgtggccgactacagcgtgctgtacaacctcgcccccttcttcaccttcaagtgctacggcgtcagcccaaccaagctcaacgacctctgcttcaccaacgtctacgccgacagcttcgtgatccgcggggacgaggtcaggcagatcgcccccggacagacaggcaacatcgccgactacaattacaaactgcccgacgacttcaccggctgcgtgatcgcctggaactccaacaaactggactccaaggtgagcggcaactacaactacctgtacaggctgttcaggaaaagcaacctgaagccgttcgagcgggacatctccacagagatctaccaggccgggaacaagccatgcaacggcgtcgccggcttcaactgctacttccccctgcggtcctactccttccgccccacctacggcgtcggccaccagccctaccgcgtcgtcgtgctctccttcgagctgctgcacgcccccgccaccgtgtgcgggccgaagaaaagcaccaacctggtgaaaaacaagtgcgtgaacttcaacttcaacgggctgaagggcaccggagtgctgaccgagtccaacaagaagttcctcccattccagcagttcgggagggacatcgccgacaccacagacgccgtgagggacccccagaccctggagatcctggacatcaccccctgcagcttcggcggcgtgagcgtgatcacccccgggacaaacacctccaaccaggtggccgtgctctaccagggcgtgaactgcaccgaggtgccagtcgccatccacgccgaccaactgacacccacctggagggtgtacagcaccggctccaacgtgttccagaccagggccgggtgcctcatcggcgccgaatacgtgaacaacagctacgagtgcgacatcccaatcggggccggcatctgcgccagctaccagacccagaccaagtcccacagacgcgcccgctccgtggcctcccagagcatcatcgcctacaccatgagcctgggagccgagaacagcgtcgcctacagcaacaacagcatcgccatccccacaaacttcaccatcagcgtgaccaccgagatcctgcccgtgtcgatgaccaagacatccgtggactgcacaatgtacatctgcggcgacagcacagagtgcagcaacctcctgctgcagtacggcagcttctgcacacagctgaaaagagccctgaccggcatcgccgtggagcaggacaagaacacacaggaggtgttcgcccaggtgaagcagatctacaaaaccccacccatcaagtacttcggcggattcaacttcagccagatcctgcccgaccccagcaagccctccaagagaagcttcatcgaggacctgctctttaacaaggtgaccctggccgacgccggattcatcaagcagtacggcgactgcctgggcgacatcgccgccagagacctgatctgcgcccagaaattcaaggggctgaccgtgctgccccccctgctcaccgacgagatgatcgcccagtacaccagcgccctgctcgccggcaccatcacctccggctggaccttcggcgccggagccgccctccagatccccttcgccatgcagatggcctaccgcttcaacgggatcggggtgacccagaacgtgctgtacgagaaccagaagctgatcgccaaccagttcaacagcgccatcggcaagatccaggacagcctctcgagcacagcctccgccctgggcaagctccaggacgtcgtcaaccacaatgcccaggccctgaacaccctcgtgaagcagctgtccagcaagttcggcgccatcagcagcgtgctcaacgacatcttcagccgcctcgaccccccagaagcagaggtccagatcgaccgcctgatcaccggcaggctgcagagcctgcagacctacgtgacacagcagctgatcagggccgccgagatcagggcctccgccaacctggccgccaccaaaatgagcgagtgcgtgctgggccagtccaagcgcgtggacttctgcgggaagggctaccacctgatgtccttcccacagagcgccccccacggggtggtgttcctgcacgtgacctacgtgccagcccaggagaagaacttcacaaccgccccagccatctgccacgacggcaaggcccacttcccccgcgagggggtgttcgtgtccaacggcacacactggttcgtcacacagcgcaacttctacgaaccccagatcatcaccaccgacaacacattcgtgtccggcaactgcgacgtggtgattgggatcgtgaacaacaccgtgtacgaccccctccagccagagctggacagcttcaaggaggaactggacaagtacttcaagaaccacacaagccccgacgtcgacctgggggacatcagcggcatcaacgccagcgtggtgaacatccagaaggagatcgaccggctgaacgaggtggccaagaacctgaacgagagcctcatcgacctacaggaactggggaagtacgagcagtacatcaaatggccctggtacatctggctgggcttcatcgccggcctgatcgccatcgtgatggtgaccatcatgctgtgctgcatgaccagctgctgcagctgcctgaagggctgctgcagctgcgggagctgctgcaagttcgacgaggacgactccgaacccgtgctgaaaggcgtgaagctgcactacacctgataaaaacgatgcagatgcaagcctgtatcagaatctgaaaaccttatataaacccctcagacagtttgcttattttattttttatgttgtaaaatgctagtataaacaaacaaattaatgttgttctaaaggctgttaaaaaaaagatgaggactcagaagttcaagctaaatattgtttacattttctggtactctgtgaaagaagagaaaagggagtcatgcattttgctttggacacagtgttttatcacctgttcatttgaagaaaaataataaagtcagaag

SEQ ID NO: 46 - RNA, 4315 nt, synthetic construct
  source 1..4315: mol_type = other RNA
agaacgcccccaaaatctgtttctaattttacagaaatcttttgaaacttggcacggtattcaaaagtccgtggaaagaaaaaaaccttgtcctggcttcagcttccaactacaaagacagacttggtccttttcaacggttttcacagatccagtgacccacgctctgaagacagaattagctaactttcaaaaacatctggaaaaatgtttgtgttcctggtgctgctgcccctggtcagcagccagtgcgtgaacctgaccacacgcacccagctgccccccgcctacaccaacagcttcaccaggggggtctactaccccgacaaggtgttcagatccagcgtgctgcacagcacccaggacctgttcctgccattcttctccaacgtgacatggttccacgtgatcagcgggaccaacggcacaaagcggttcgacaaccccgtgctgccattcaacgacggggtgtacttcgcctcaatcgagaaaagcaacatcatccgcggctggatcttcggcacaaccctcgacagcaagacccagtccctgctcatcgtgaacaacgccaccaacgtggtcatcaaggtctgcgagttccagttctgcaacgacccattcctggaccacaaaaacaacaagtcctggatggagtccgagttccgggtctactccagcgccaacaactgcaccttcgagtacgtgtctcagcccttcctgatggacctggagggaaagcagggcaacttcaagaacctgcgcgagttcgtcttcaagaacatcgacgggtacttcaaaatctacagcaagcacacccccatcatcgtgcgggagcccgaggacctgccccagggattcagcgccctggagccactggtggacctgccaatcggcatcaacatcacaaggttccagaccctgctggccctccacaggagctacctgacacccggcgacagcagctccggctggaccgccggggcagccgcctactacgtaggctacctgcagccaaggaccttcctgctgaaatacaacgagaacggcacaatcaccgacgccgtggactgcgccctggaccccctgagcgagaccaaatgcaccctgaaaagcttcaccgtggaaaaggggatctaccagaccagcaacttcagggtgcagcccaccgagagcatcgtgcgcttccccaacatcacaaacctgtgcccattcgacgaggtgttcaacgccacacgcttcgccagcgtgtacgcctggaaccggaaacgcatcagcaactgcgtggccgactacagcgtgctgtacaacctcgcccccttcttcaccttcaagtgctacggcgtcagcccaaccaagctcaacgacctctgcttcaccaacgtctacgccgacagcttcgtgatccgcggggacgaggtcaggcagatcgcccccggacagacaggcaacatcgccgactacaattacaaactgcccgacgacttcaccggctgcgtgatcgcctggaactccaacaaactggactccaaggtgagcggcaactacaactacctgtacaggctgttcaggaaaagcaacctgaagccgttcgagcgggacatctccacagagatctaccaggccgggaacaagccatgcaacggcgtcgccggcttcaactgctacttccccctgcggtcctactccttccgccccacctacggcgtcggccaccagccctaccgcgtcgtcgtgctctccttcgagctgctgcacgcccccgccaccgtgtgcgggccgaagaaaagcaccaacctggtgaaaaacaagtgcgtgaacttcaacttcaacgggctgaagggcaccggagtgctgaccgagtccaacaagaagttcctcccattccagcagttcgggagggacatcgccgacaccacagacgccgtgagggacccccagaccctggagatcctggacatcaccccctgcagcttcggcggcgtgagcgtgatcacccccgggacaaacacctccaaccaggtggccgtgctctaccagggcgtgaactgcaccgaggtgccagtcgccatccacgccgaccaactgacacccacctggagggtgtacagcaccggctccaacgtgttccagaccagggccgggtgcctcatcggcgccgaatacgtgaacaacagctacgagtgcgacatcccaatcggggccggcatctgcgccagctaccagacccagaccaagtcccacagacgcgcccgctccgtggcctcccagagcatcatcgcctacaccatgagcctgggagccgagaacagcgtcgcctacagcaacaacagcatcgccatccccacaaacttcaccatcagcgtgaccaccgagatcctgcccgtgtcgatgaccaagacatccgtggactgcacaatgtacatctgcggcgacagcacagagtgcagcaacctcctgctgcagtacggcagcttctgcacacagctgaaaagagccctgaccggcatcgccgtggagcaggacaagaacacacaggaggtgttcgcccaggtgaagcagatctacaaaaccccacccatcaagtacttcggcggattcaacttcagccagatcctgcccgaccccagcaagccctccaagagaagcttcatcgaggacctgctctttaacaaggtgaccctggccgacgccggattcatcaagcagtacggcgactgcctgggcgacatcgccgccagagacctgatctgcgcccagaaattcaaggggctgaccgtgctgccccccctgctcaccgacgagatgatcgcccagtacaccagcgccctgctcgccggcaccatcacctccggctggaccttcggcgccggagccgccctccagatccccttcgccatgcagatggcctaccgcttcaacgggatcggggtgacccagaacgtgctgtacgagaaccagaagctgatcgccaaccagttcaacagcgccatcggcaagatccaggacagcctctcgagcacagcctccgccctgggcaagctccaggacgtcgtcaaccacaatgcccaggccctgaacaccctcgtgaagcagctgtccagcaagttcggcgccatcagcagcgtgctcaacgacatcttcagccgcctcgaccccccagaagcagaggtccagatcgaccgcctgatcaccggcaggctgcagagcctgcagacctacgtgacacagcagctgatcagggccgccgagatcagggcctccgccaacctggccgccaccaaaatgagcgagtgcgtgctgggccagtccaagcgcgtggacttctgcgggaagggctaccacctgatgtccttcccacagagcgccccccacggggtggtgttcctgcacgtgacctacgtgccagcccaggagaagaacttcacaaccgccccagccatctgccacgacggcaaggcccacttcccccgcgagggggtgttcgtgtccaacggcacacactggttcgtcacacagcgcaacttctacgaaccccagatcatcaccaccgacaacacattcgtgtccggcaactgcgacgtggtgattgggatcgtgaacaacaccgtgtacgaccccctccagccagagctggacagcttcaaggaggaactggacaagtacttcaagaaccacacaagccccgacgtcgacctgggggacatcagcggcatcaacgccagcgtggtgaacatccagaaggagatcgaccggctgaacgaggtggccaagaacctgaacgagagcctcatcgacctacaggaactggggaagtacgagcagtacatcaaatggccctggtacatctggctgggcttcatcgccggcctgatcgccatcgtgatggtgaccatcatgctgtgctgcatgaccagctgctgcagctgcctgaagggctgctgcagctgcgggagctgctgcaagttcgacgaggacgactccgaacccgtgctgaaaggcgtgaagctgcactacacctgataaaaacgatgcagatgcaagcctgtatcagaatctgaaaaccttatataaacccctcagacagtttgcttattttattttttatgttgtaaaatgctagtataaacaaacaaattaatgttgttctaaaggctgttaaaaaaaagatgaggactcagaagttcaagctaaatattgtttacattttctggtactctgtgaaagaagagaaaagggagtcatgcattttgctttggacacagtgttttatcacctgttcatttgaagaaaaataataaagtcagaagttcattgc

SEQ ID NO: 47 - RNA, 4443 nt, synthetic construct
  source 1..4443: mol_type = other RNA
aggaagaacgcccccaaaatctgtttctaattttacagaaatcttttgaaacttggcacggtattcaaaagtccgtggaaagaaaaaaaccttgtcctggcttcagcttccaactacaaagacagacttggtccttttcaacggttttcacagatccagtgacccacgctctgaagacagaattagctaactttcaaaaacatctggaaaaatgtttgtgttcctggtgctgctgcccctggtcagcagccagtgcgtgaacctgaccacacgcacccagctgccccccgcctacaccaacagcttcaccaggggggtctactaccccgacaaggtgttcagatccagcgtgctgcacagcacccaggacctgttcctgccattcttctccaacgtgacatggttccacgtgatcagcgggaccaacggcacaaagcggttcgacaaccccgtgctgccattcaacgacggggtgtacttcgcctcaatcgagaaaagcaacatcatccgcggctggatcttcggcacaaccctcgacagcaagacccagtccctgctcatcgtgaacaacgccaccaacgtggtcatcaaggtctgcgagttccagttctgcaacgacccattcctggaccacaaaaacaacaagtcctggatggagtccgagttccgggtctactccagcgccaacaactgcaccttcgagtacgtgtctcagcccttcctgatggacctggagggaaagcagggcaacttcaagaacctgcgcgagttcgtcttcaagaacatcgacgggtacttcaaaatctacagcaagcacacccccatcatcgtgcgggagcccgaggacctgccccagggattcagcgccctggagccactggtggacctgccaatcggcatcaacatcacaaggttccagaccctgctggccctccacaggagctacctgacacccggcgacagcagctccggctggaccgccggggcagccgcctactacgtaggctacctgcagccaaggaccttcctgctgaaatacaacgagaacggcacaatcaccgacgccgtggactgcgccctggaccccctgagcgagaccaaatgcaccctgaaaagcttcaccgtggaaaaggggatctaccagaccagcaacttcagggtgcagcccaccgagagcatcgtgcgcttccccaacatcacaaacctgtgcccattcgacgaggtgttcaacgccacacgcttcgccagcgtgtacgcctggaaccggaaacgcatcagcaactgcgtggccgactacagcgtgctgtacaacctcgcccccttcttcaccttcaagtgctacggcgtcagcccaaccaagctcaacgacctctgcttcaccaacgtctacgccgacagcttcgtgatccgcggggacgaggtcaggcagatcgcccccggacagacaggcaacatcgccgactacaattacaaactgcccgacgacttcaccggctgcgtgatcgcctggaactccaacaaactggactccaaggtgagcggcaactacaactacctgtacaggctgttcaggaaaagcaacctgaagccgttcgagcgggacatctccacagagatctaccaggccgggaacaagccatgcaacggcgtcgccggcttcaactgctacttccccctgcggtcctactccttccgccccacctacggcgtcggccaccagccctaccgcgtcgtcgtgctctccttcgagctgctgcacgcccccgccaccgtgtgcgggccgaagaaaagcaccaacctggtgaaaaacaagtgcgtgaacttcaacttcaacgggctgaagggcaccggagtgctgaccgagtccaacaagaagttcctcccattccagcagttcgggagggacatcgccgacaccacagacgccgtgagggacccccagaccctggagatcctggacatcaccccctgcagcttcggcggcgtgagcgtgatcacccccgggacaaacacctccaaccaggtggccgtgctctaccagggcgtgaactgcaccgaggtgccagtcgccatccacgccgaccaactgacacccacctggagggtgtacagcaccggctccaacgtgttccagaccagggccgggtgcctcatcggcgccgaatacgtgaacaacagctacgagtgcgacatcccaatcggggccggcatctgcgccagctaccagacccagaccaagtcccacagacgcgcccgctccgtggcctcccagagcatcatcgcctacaccatgagcctgggagccgagaacagcgtcgcctacagcaacaacagcatcgccatccccacaaacttcaccatcagcgtgaccaccgagatcctgcccgtgtcgatgaccaagacatccgtggactgcacaatgtacatctgcggcgacagcacagagtgcagcaacctcctgctgcagtacggcagcttctgcacacagctgaaaagagccctgaccggcatcgccgtggagcaggacaagaacacacaggaggtgttcgcccaggtgaagcagatctacaaaaccccacccatcaagtacttcggcggattcaacttcagccagatcctgcccgaccccagcaagccctccaagagaagcttcatcgaggacctgctctttaacaaggtgaccctggccgacgccggattcatcaagcagtacggcgactgcctgggcgacatcgccgccagagacctgatctgcgcccagaaattcaaggggctgaccgtgctgccccccctgctcaccgacgagatgatcgcccagtacaccagcgccctgctcgccggcaccatcacctccggctggaccttcggcgccggagccgccctccagatccccttcgccatgcagatggcctaccgcttcaacgggatcggggtgacccagaacgtgctgtacgagaaccagaagctgatcgccaaccagttcaacagcgccatcggcaagatccaggacagcctctcgagcacagcctccgccctgggcaagctccaggacgtcgtcaaccacaatgcccaggccctgaacaccctcgtgaagcagctgtccagcaagttcggcgccatcagcagcgtgctcaacgacatcttcagccgcctcgaccccccagaagcagaggtccagatcgaccgcctgatcaccggcaggctgcagagcctgcagacctacgtgacacagcagctgatcagggccgccgagatcagggcctccgccaacctggccgccaccaaaatgagcgagtgcgtgctgggccagtccaagcgcgtggacttctgcgggaagggctaccacctgatgtccttcccacagagcgccccccacggggtggtgttcctgcacgtgacctacgtgccagcccaggagaagaacttcacaaccgccccagccatctgccacgacggcaaggcccacttcccccgcgagggggtgttcgtgtccaacggcacacactggttcgtcacacagcgcaacttctacgaaccccagatcatcaccaccgacaacacattcgtgtccggcaactgcgacgtggtgattgggatcgtgaacaacaccgtgtacgaccccctccagccagagctggacagcttcaaggaggaactggacaagtacttcaagaaccacacaagccccgacgtcgacctgggggacatcagcggcatcaacgccagcgtggtgaacatccagaaggagatcgaccggctgaacgaggtggccaagaacctgaacgagagcctcatcgacctacaggaactggggaagtacgagcagtacatcaaatggccctggtacatctggctgggcttcatcgccggcctgatcgccatcgtgatggtgaccatcatgctgtgctgcatgaccagctgctgcagctgcctgaagggctgctgcagctgcgggagctgctgcaagttcgacgaggacgactccgaacccgtgctgaaaggcgtgaagctgcactacacctgataaaaacgatgcagatgcaagcctgtatcagaatctgaaaaccttatataaacccctcagacagtttgcttattttattttttatgttgtaaaatgctagtataaacaaacaaattaatgttgttctaaaggctgttaaaaaaaagatgaggactcagaagttcaagctaaatattgtttacattttctggtactctgtgaaagaagagaaaagggagtcatgcattttgctttggacacagtgttttatcacctgttcatttgaagaaaaataataaagtcagaagttcattgcaaaaaaaaaaaaaaaaaaaaaaaaaaaaaagcatatgactaaaaaaaaaaaaaaaaaaaaaaaaaaaaaaaaaaaaaaaaaaaaaaaaaaaaaaaaaaaaaaaaaaaaaaaaaaaaaaaaaaaa

SEQ ID NO: 48 - RNA, 3900 nt, synthetic construct
  source 1..3900: mol_type = other RNA
agaagctgtctatcgggctccagcggtcatgtttgtgttcctggtgctgctgcccctggtcagcagccagtgcgtgaacctgaccacacgcacccagctgccccccgcctacaccaacagcttcaccaggggggtctactaccccgacaaggtgttcagatccagcgtgctgcacagcacccaggacctgttcctgccattcttctccaacgtgacatggttccacgtgatcagcgggaccaacggcacaaagcggttcgacaaccccgtgctgccattcaacgacggggtgtacttcgcctcaatcgagaaaagcaacatcatccgcggctggatcttcggcacaaccctcgacagcaagacccagtccctgctcatcgtgaacaacgccaccaacgtggtcatcaaggtctgcgagttccagttctgcaacgacccattcctggaccacaaaaacaacaagtcctggatggagtccgagttccgggtctactccagcgccaacaactgcaccttcgagtacgtgtctcagcccttcctgatggacctggagggaaagcagggcaacttcaagaacctgcgcgagttcgtcttcaagaacatcgacgggtacttcaaaatctacagcaagcacacccccatcatcgtgcgggagcccgaggacctgccccagggattcagcgccctggagccactggtggacctgccaatcggcatcaacatcacaaggttccagaccctgctggccctccacaggagctacctgacacccggcgacagcagctccggctggaccgccggggcagccgcctactacgtaggctacctgcagccaaggaccttcctgctgaaatacaacgagaacggcacaatcaccgacgccgtggactgcgccctggaccccctgagcgagaccaaatgcaccctgaaaagcttcaccgtggaaaaggggatctaccagaccagcaacttcagggtgcagcccaccgagagcatcgtgcgcttccccaacatcacaaacctgtgcccattcgacgaggtgttcaacgccacacgcttcgccagcgtgtacgcctggaaccggaaacgcatcagcaactgcgtggccgactacagcgtgctgtacaacctcgcccccttcttcaccttcaagtgctacggcgtcagcccaaccaagctcaacgacctctgcttcaccaacgtctacgccgacagcttcgtgatccgcggggacgaggtcaggcagatcgcccccggacagacaggcaacatcgccgactacaattacaaactgcccgacgacttcaccggctgcgtgatcgcctggaactccaacaaactggactccaaggtgagcggcaactacaactacctgtacaggctgttcaggaaaagcaacctgaagccgttcgagcgggacatctccacagagatctaccaggccgggaacaagccatgcaacggcgtcgccggcttcaactgctacttccccctgcggtcctactccttccgccccacctacggcgtcggccaccagccctaccgcgtcgtcgtgctctccttcgagctgctgcacgcccccgccaccgtgtgcgggccgaagaaaagcaccaacctggtgaaaaacaagtgcgtgaacttcaacttcaacgggctgaagggcaccggagtgctgaccgagtccaacaagaagttcctcccattccagcagttcgggagggacatcgccgacaccacagacgccgtgagggacccccagaccctggagatcctggacatcaccccctgcagcttcggcggcgtgagcgtgatcacccccgggacaaacacctccaaccaggtggccgtgctctaccagggcgtgaactgcaccgaggtgccagtcgccatccacgccgaccaactgacacccacctggagggtgtacagcaccggctccaacgtgttccagaccagggccgggtgcctcatcggcgccgaatacgtgaacaacagctacgagtgcgacatcccaatcggggccggcatctgcgccagctaccagacccagaccaagtcccacagacgcgcccgctccgtggcctcccagagcatcatcgcctacaccatgagcctgggagccgagaacagcgtcgcctacagcaacaacagcatcgccatccccacaaacttcaccatcagcgtgaccaccgagatcctgcccgtgtcgatgaccaagacatccgtggactgcacaatgtacatctgcggcgacagcacagagtgcagcaacctcctgctgcagtacggcagcttctgcacacagctgaaaagagccctgaccggcatcgccgtggagcaggacaagaacacacaggaggtgttcgcccaggtgaagcagatctacaaaaccccacccatcaagtacttcggcggattcaacttcagccagatcctgcccgaccccagcaagccctccaagagaagcttcatcgaggacctgctctttaacaaggtgaccctggccgacgccggattcatcaagcagtacggcgactgcctgggcgacatcgccgccagagacctgatctgcgcccagaaattcaaggggctgaccgtgctgccccccctgctcaccgacgagatgatcgcccagtacaccagcgccctgctcgccggcaccatcacctccggctggaccttcggcgccggagccgccctccagatccccttcgccatgcagatggcctaccgcttcaacgggatcggggtgacccagaacgtgctgtacgagaaccagaagctgatcgccaaccagttcaacagcgccatcggcaagatccaggacagcctctcgagcacagcctccgccctgggcaagctccaggacgtcgtcaaccacaatgcccaggccctgaacaccctcgtgaagcagctgtccagcaagttcggcgccatcagcagcgtgctcaacgacatcttcagccgcctcgaccccccagaagcagaggtccagatcgaccgcctgatcaccggcaggctgcagagcctgcagacctacgtgacacagcagctgatcagggccgccgagatcagggcctccgccaacctggccgccaccaaaatgagcgagtgcgtgctgggccagtccaagcgcgtggacttctgcgggaagggctaccacctgatgtccttcccacagagcgccccccacggggtggtgttcctgcacgtgacctacgtgccagcccaggagaagaacttcacaaccgccccagccatctgccacgacggcaaggcccacttcccccgcgagggggtgttcgtgtccaacggcacacactggttcgtcacacagcgcaacttctacgaaccccagatcatcaccaccgacaacacattcgtgtccggcaactgcgacgtggtgattgggatcgtgaacaacaccgtgtacgaccccctccagccagagctggacagcttcaaggaggaactggacaagtacttcaagaaccacacaagccccgacgtcgacctgggggacatcagcggcatcaacgccagcgtggtgaacatccagaaggagatcgaccggctgaacgaggtggccaagaacctgaacgagagcctcatcgacctacaggaactggggaagtacgagcagtacatcaaatggccctggtacatctggctgggcttcatcgccggcctgatcgccatcgtgatggtgaccatcatgctgtgctgcatgaccagctgctgcagctgcctgaagggctgctgcagctgcgggagctgctgcaagttcgacgaggacgactccgaacccgtgctgaaaggcgtgaagctgcactacacctgataagccgccgctccagctttgcacgtttcgatcccaaaggccctttttagggccgacca

SEQ ID NO: 49 - RNA, 3908 nt, synthetic construct
  source 1..3908: mol_type = other RNA
agaagctgtctatcgggctccagcggtcatgtttgtgttcctggtgctgctgcccctggtcagcagccagtgcgtgaacctgaccacacgcacccagctgccccccgcctacaccaacagcttcaccaggggggtctactaccccgacaaggtgttcagatccagcgtgctgcacagcacccaggacctgttcctgccattcttctccaacgtgacatggttccacgtgatcagcgggaccaacggcacaaagcggttcgacaaccccgtgctgccattcaacgacggggtgtacttcgcctcaatcgagaaaagcaacatcatccgcggctggatcttcggcacaaccctcgacagcaagacccagtccctgctcatcgtgaacaacgccaccaacgtggtcatcaaggtctgcgagttccagttctgcaacgacccattcctggaccacaaaaacaacaagtcctggatggagtccgagttccgggtctactccagcgccaacaactgcaccttcgagtacgtgtctcagcccttcctgatggacctggagggaaagcagggcaacttcaagaacctgcgcgagttcgtcttcaagaacatcgacgggtacttcaaaatctacagcaagcacacccccatcatcgtgcgggagcccgaggacctgccccagggattcagcgccctggagccactggtggacctgccaatcggcatcaacatcacaaggttccagaccctgctggccctccacaggagctacctgacacccggcgacagcagctccggctggaccgccggggcagccgcctactacgtaggctacctgcagccaaggaccttcctgctgaaatacaacgagaacggcacaatcaccgacgccgtggactgcgccctggaccccctgagcgagaccaaatgcaccctgaaaagcttcaccgtggaaaaggggatctaccagaccagcaacttcagggtgcagcccaccgagagcatcgtgcgcttccccaacatcacaaacctgtgcccattcgacgaggtgttcaacgccacacgcttcgccagcgtgtacgcctggaaccggaaacgcatcagcaactgcgtggccgactacagcgtgctgtacaacctcgcccccttcttcaccttcaagtgctacggcgtcagcccaaccaagctcaacgacctctgcttcaccaacgtctacgccgacagcttcgtgatccgcggggacgaggtcaggcagatcgcccccggacagacaggcaacatcgccgactacaattacaaactgcccgacgacttcaccggctgcgtgatcgcctggaactccaacaaactggactccaaggtgagcggcaactacaactacctgtacaggctgttcaggaaaagcaacctgaagccgttcgagcgggacatctccacagagatctaccaggccgggaacaagccatgcaacggcgtcgccggcttcaactgctacttccccctgcggtcctactccttccgccccacctacggcgtcggccaccagccctaccgcgtcgtcgtgctctccttcgagctgctgcacgcccccgccaccgtgtgcgggccgaagaaaagcaccaacctggtgaaaaacaagtgcgtgaacttcaacttcaacgggctgaagggcaccggagtgctgaccgagtccaacaagaagttcctcccattccagcagttcgggagggacatcgccgacaccacagacgccgtgagggacccccagaccctggagatcctggacatcaccccctgcagcttcggcggcgtgagcgtgatcacccccgggacaaacacctccaaccaggtggccgtgctctaccagggcgtgaactgcaccgaggtgccagtcgccatccacgccgaccaactgacacccacctggagggtgtacagcaccggctccaacgtgttccagaccagggccgggtgcctcatcggcgccgaatacgtgaacaacagctacgagtgcgacatcccaatcggggccggcatctgcgccagctaccagacccagaccaagtcccacagacgcgcccgctccgtggcctcccagagcatcatcgcctacaccatgagcctgggagccgagaacagcgtcgcctacagcaacaacagcatcgccatccccacaaacttcaccatcagcgtgaccaccgagatcctgcccgtgtcgatgaccaagacatccgtggactgcacaatgtacatctgcggcgacagcacagagtgcagcaacctcctgctgcagtacggcagcttctgcacacagctgaaaagagccctgaccggcatcgccgtggagcaggacaagaacacacaggaggtgttcgcccaggtgaagcagatctacaaaaccccacccatcaagtacttcggcggattcaacttcagccagatcctgcccgaccccagcaagccctccaagagaagcttcatcgaggacctgctctttaacaaggtgaccctggccgacgccggattcatcaagcagtacggcgactgcctgggcgacatcgccgccagagacctgatctgcgcccagaaattcaaggggctgaccgtgctgccccccctgctcaccgacgagatgatcgcccagtacaccagcgccctgctcgccggcaccatcacctccggctggaccttcggcgccggagccgccctccagatccccttcgccatgcagatggcctaccgcttcaacgggatcggggtgacccagaacgtgctgtacgagaaccagaagctgatcgccaaccagttcaacagcgccatcggcaagatccaggacagcctctcgagcacagcctccgccctgggcaagctccaggacgtcgtcaaccacaatgcccaggccctgaacaccctcgtgaagcagctgtccagcaagttcggcgccatcagcagcgtgctcaacgacatcttcagccgcctcgaccccccagaagcagaggtccagatcgaccgcctgatcaccggcaggctgcagagcctgcagacctacgtgacacagcagctgatcagggccgccgagatcagggcctccgccaacctggccgccaccaaaatgagcgagtgcgtgctgggccagtccaagcgcgtggacttctgcgggaagggctaccacctgatgtccttcccacagagcgccccccacggggtggtgttcctgcacgtgacctacgtgccagcccaggagaagaacttcacaaccgccccagccatctgccacgacggcaaggcccacttcccccgcgagggggtgttcgtgtccaacggcacacactggttcgtcacacagcgcaacttctacgaaccccagatcatcaccaccgacaacacattcgtgtccggcaactgcgacgtggtgattgggatcgtgaacaacaccgtgtacgaccccctccagccagagctggacagcttcaaggaggaactggacaagtacttcaagaaccacacaagccccgacgtcgacctgggggacatcagcggcatcaacgccagcgtggtgaacatccagaaggagatcgaccggctgaacgaggtggccaagaacctgaacgagagcctcatcgacctacaggaactggggaagtacgagcagtacatcaaatggccctggtacatctggctgggcttcatcgccggcctgatcgccatcgtgatggtgaccatcatgctgtgctgcatgaccagctgctgcagctgcctgaagggctgctgcagctgcgggagctgctgcaagttcgacgaggacgactccgaacccgtgctgaaaggcgtgaagctgcactacacctgataagccgccgctccagctttgcacgtttcgatcccaaaggccctttttagggccgaccattcattgc

SEQ ID NO: 50 - RNA, 4035 nt, synthetic construct
  source 1..4035: mol_type = other RNA
aggagaagctgtctatcgggctccagcggtcatgtttgtgttcctggtgctgctgcccctggtcagcagccagtgcgtgaacctgaccacacgcacccagctgccccccgcctacaccaacagcttcaccaggggggtctactaccccgacaaggtgttcagatccagcgtgctgcacagcacccaggacctgttcctgccattcttctccaacgtgacatggttccacgtgatcagcgggaccaacggcacaaagcggttcgacaaccccgtgctgccattcaacgacggggtgtacttcgcctcaatcgagaaaagcaacatcatccgcggctggatcttcggcacaaccctcgacagcaagacccagtccctgctcatcgtgaacaacgccaccaacgtggtcatcaaggtctgcgagttccagttctgcaacgacccattcctggaccacaaaaacaacaagtcctggatggagtccgagttccgggtctactccagcgccaacaactgcaccttcgagtacgtgtctcagcccttcctgatggacctggagggaaagcagggcaacttcaagaacctgcgcgagttcgtcttcaagaacatcgacgggtacttcaaaatctacagcaagcacacccccatcatcgtgcgggagcccgaggacctgccccagggattcagcgccctggagccactggtggacctgccaatcggcatcaacatcacaaggttccagaccctgctggccctccacaggagctacctgacacccggcgacagcagctccggctggaccgccggggcagccgcctactacgtaggctacctgcagccaaggaccttcctgctgaaatacaacgagaacggcacaatcaccgacgccgtggactgcgccctggaccccctgagcgagaccaaatgcaccctgaaaagcttcaccgtggaaaaggggatctaccagaccagcaacttcagggtgcagcccaccgagagcatcgtgcgcttccccaacatcacaaacctgtgcccattcgacgaggtgttcaacgccacacgcttcgccagcgtgtacgcctggaaccggaaacgcatcagcaactgcgtggccgactacagcgtgctgtacaacctcgcccccttcttcaccttcaagtgctacggcgtcagcccaaccaagctcaacgacctctgcttcaccaacgtctacgccgacagcttcgtgatccgcggggacgaggtcaggcagatcgcccccggacagacaggcaacatcgccgactacaattacaaactgcccgacgacttcaccggctgcgtgatcgcctggaactccaacaaactggactccaaggtgagcggcaactacaactacctgtacaggctgttcaggaaaagcaacctgaagccgttcgagcgggacatctccacagagatctaccaggccgggaacaagccatgcaacggcgtcgccggcttcaactgctacttccccctgcggtcctactccttccgccccacctacggcgtcggccaccagccctaccgcgtcgtcgtgctctccttcgagctgctgcacgcccccgccaccgtgtgcgggccgaagaaaagcaccaacctggtgaaaaacaagtgcgtgaacttcaacttcaacgggctgaagggcaccggagtgctgaccgagtccaacaagaagttcctcccattccagcagttcgggagggacatcgccgacaccacagacgccgtgagggacccccagaccctggagatcctggacatcaccccctgcagcttcggcggcgtgagcgtgatcacccccgggacaaacacctccaaccaggtggccgtgctctaccagggcgtgaactgcaccgaggtgccagtcgccatccacgccgaccaactgacacccacctggagggtgtacagcaccggctccaacgtgttccagaccagggccgggtgcctcatcggcgccgaatacgtgaacaacagctacgagtgcgacatcccaatcggggccggcatctgcgccagctaccagacccagaccaagtcccacagacgcgcccgctccgtggcctcccagagcatcatcgcctacaccatgagcctgggagccgagaacagcgtcgcctacagcaacaacagcatcgccatccccacaaacttcaccatcagcgtgaccaccgagatcctgcccgtgtcgatgaccaagacatccgtggactgcacaatgtacatctgcggcgacagcacagagtgcagcaacctcctgctgcagtacggcagcttctgcacacagctgaaaagagccctgaccggcatcgccgtggagcaggacaagaacacacaggaggtgttcgcccaggtgaagcagatctacaaaaccccacccatcaagtacttcggcggattcaacttcagccagatcctgcccgaccccagcaagccctccaagagaagcttcatcgaggacctgctctttaacaaggtgaccctggccgacgccggattcatcaagcagtacggcgactgcctgggcgacatcgccgccagagacctgatctgcgcccagaaattcaaggggctgaccgtgctgccccccctgctcaccgacgagatgatcgcccagtacaccagcgccctgctcgccggcaccatcacctccggctggaccttcggcgccggagccgccctccagatccccttcgccatgcagatggcctaccgcttcaacgggatcggggtgacccagaacgtgctgtacgagaaccagaagctgatcgccaaccagttcaacagcgccatcggcaagatccaggacagcctctcgagcacagcctccgccctgggcaagctccaggacgtcgtcaaccacaatgcccaggccctgaacaccctcgtgaagcagctgtccagcaagttcggcgccatcagcagcgtgctcaacgacatcttcagccgcctcgaccccccagaagcagaggtccagatcgaccgcctgatcaccggcaggctgcagagcctgcagacctacgtgacacagcagctgatcagggccgccgagatcagggcctccgccaacctggccgccaccaaaatgagcgagtgcgtgctgggccagtccaagcgcgtggacttctgcgggaagggctaccacctgatgtccttcccacagagcgccccccacggggtggtgttcctgcacgtgacctacgtgccagcccaggagaagaacttcacaaccgccccagccatctgccacgacggcaaggcccacttcccccgcgagggggtgttcgtgtccaacggcacacactggttcgtcacacagcgcaacttctacgaaccccagatcatcaccaccgacaacacattcgtgtccggcaactgcgacgtggtgattgggatcgtgaacaacaccgtgtacgaccccctccagccagagctggacagcttcaaggaggaactggacaagtacttcaagaaccacacaagccccgacgtcgacctgggggacatcagcggcatcaacgccagcgtggtgaacatccagaaggagatcgaccggctgaacgaggtggccaagaacctgaacgagagcctcatcgacctacaggaactggggaagtacgagcagtacatcaaatggccctggtacatctggctgggcttcatcgccggcctgatcgccatcgtgatggtgaccatcatgctgtgctgcatgaccagctgctgcagctgcctgaagggctgctgcagctgcgggagctgctgcaagttcgacgaggacgactccgaacccgtgctgaaaggcgtgaagctgcactacacctgataagccgccgctccagctttgcacgtttcgatcccaaaggccctttttagggccgaccattcattgcaaaaaaaaaaaaaaaaaaaaaaaaaaaaaagcatatgactaaaaaaaaaaaaaaaaaaaaaaaaaaaaaaaaaaaaaaaaaaaaaaaaaaaaaaaaaaaaaaaaaaaaaaaaaaaaaaaaaaaa

SEQ ID NO: 51 - RNA, 4067 nt, synthetic construct
  source 1..4067: mol_type = other RNA
gttccctatcactctctttaatcactactcacagtaacctcaactcctgccacaatgtttgtgttcctggtgctgctgcccctggtcagcagccagtgcgtgaacctgaccacacgcacccagctgccccccgcctacaccaacagcttcaccaggggggtctactaccccgacaaggtgttcagatccagcgtgctgcacagcacccaggacctgttcctgccattcttctccaacgtgacatggttccacgtgatcagcgggaccaacggcacaaagcggttcgacaaccccgtgctgccattcaacgacggggtgtacttcgcctcaatcgagaaaagcaacatcatccgcggctggatcttcggcacaaccctcgacagcaagacccagtccctgctcatcgtgaacaacgccaccaacgtggtcatcaaggtctgcgagttccagttctgcaacgacccattcctggaccacaaaaacaacaagtcctggatggagtccgagttccgggtctactccagcgccaacaactgcaccttcgagtacgtgtctcagcccttcctgatggacctggagggaaagcagggcaacttcaagaacctgcgcgagttcgtcttcaagaacatcgacgggtacttcaaaatctacagcaagcacacccccatcatcgtgcgggagcccgaggacctgccccagggattcagcgccctggagccactggtggacctgccaatcggcatcaacatcacaaggttccagaccctgctggccctccacaggagctacctgacacccggcgacagcagctccggctggaccgccggggcagccgcctactacgtaggctacctgcagccaaggaccttcctgctgaaatacaacgagaacggcacaatcaccgacgccgtggactgcgccctggaccccctgagcgagaccaaatgcaccctgaaaagcttcaccgtggaaaaggggatctaccagaccagcaacttcagggtgcagcccaccgagagcatcgtgcgcttccccaacatcacaaacctgtgcccattcgacgaggtgttcaacgccacacgcttcgccagcgtgtacgcctggaaccggaaacgcatcagcaactgcgtggccgactacagcgtgctgtacaacctcgcccccttcttcaccttcaagtgctacggcgtcagcccaaccaagctcaacgacctctgcttcaccaacgtctacgccgacagcttcgtgatccgcggggacgaggtcaggcagatcgcccccggacagacaggcaacatcgccgactacaattacaaactgcccgacgacttcaccggctgcgtgatcgcctggaactccaacaaactggactccaaggtgagcggcaactacaactacctgtacaggctgttcaggaaaagcaacctgaagccgttcgagcgggacatctccacagagatctaccaggccgggaacaagccatgcaacggcgtcgccggcttcaactgctacttccccctgcggtcctactccttccgccccacctacggcgtcggccaccagccctaccgcgtcgtcgtgctctccttcgagctgctgcacgcccccgccaccgtgtgcgggccgaagaaaagcaccaacctggtgaaaaacaagtgcgtgaacttcaacttcaacgggctgaagggcaccggagtgctgaccgagtccaacaagaagttcctcccattccagcagttcgggagggacatcgccgacaccacagacgccgtgagggacccccagaccctggagatcctggacatcaccccctgcagcttcggcggcgtgagcgtgatcacccccgggacaaacacctccaaccaggtggccgtgctctaccagggcgtgaactgcaccgaggtgccagtcgccatccacgccgaccaactgacacccacctggagggtgtacagcaccggctccaacgtgttccagaccagggccgggtgcctcatcggcgccgaatacgtgaacaacagctacgagtgcgacatcccaatcggggccggcatctgcgccagctaccagacccagaccaagtcccacagacgcgcccgctccgtggcctcccagagcatcatcgcctacaccatgagcctgggagccgagaacagcgtcgcctacagcaacaacagcatcgccatccccacaaacttcaccatcagcgtgaccaccgagatcctgcccgtgtcgatgaccaagacatccgtggactgcacaatgtacatctgcggcgacagcacagagtgcagcaacctcctgctgcagtacggcagcttctgcacacagctgaaaagagccctgaccggcatcgccgtggagcaggacaagaacacacaggaggtgttcgcccaggtgaagcagatctacaaaaccccacccatcaagtacttcggcggattcaacttcagccagatcctgcccgaccccagcaagccctccaagagaagcttcatcgaggacctgctctttaacaaggtgaccctggccgacgccggattcatcaagcagtacggcgactgcctgggcgacatcgccgccagagacctgatctgcgcccagaaattcaaggggctgaccgtgctgccccccctgctcaccgacgagatgatcgcccagtacaccagcgccctgctcgccggcaccatcacctccggctggaccttcggcgccggagccgccctccagatccccttcgccatgcagatggcctaccgcttcaacgggatcggggtgacccagaacgtgctgtacgagaaccagaagctgatcgccaaccagttcaacagcgccatcggcaagatccaggacagcctctcgagcacagcctccgccctgggcaagctccaggacgtcgtcaaccacaatgcccaggccctgaacaccctcgtgaagcagctgtccagcaagttcggcgccatcagcagcgtgctcaacgacatcttcagccgcctcgaccccccagaagcagaggtccagatcgaccgcctgatcaccggcaggctgcagagcctgcagacctacgtgacacagcagctgatcagggccgccgagatcagggcctccgccaacctggccgccaccaaaatgagcgagtgcgtgctgggccagtccaagcgcgtggacttctgcgggaagggctaccacctgatgtccttcccacagagcgccccccacggggtggtgttcctgcacgtgacctacgtgccagcccaggagaagaacttcacaaccgccccagccatctgccacgacggcaaggcccacttcccccgcgagggggtgttcgtgtccaacggcacacactggttcgtcacacagcgcaacttctacgaaccccagatcatcaccaccgacaacacattcgtgtccggcaactgcgacgtggtgattgggatcgtgaacaacaccgtgtacgaccccctccagccagagctggacagcttcaaggaggaactggacaagtacttcaagaaccacacaagccccgacgtcgacctgggggacatcagcggcatcaacgccagcgtggtgaacatccagaaggagatcgaccggctgaacgaggtggccaagaacctgaacgagagcctcatcgacctacaggaactggggaagtacgagcagtacatcaaatggccctggtacatctggctgggcttcatcgccggcctgatcgccatcgtgatggtgaccatcatgctgtgctgcatgaccagctgctgcagctgcctgaagggctgctgcagctgcgggagctgctgcaagttcgacgaggacgactccgaacccgtgctgaaaggcgtgaagctgcactacacctgataattaagtgcttcccacttaaaacatatcaggccttctatttatttaaatatttaaattttatatttattgttgaatgtatggtttgctacctattgtaactattattcttaatcttaaaactataaatatggatcttttatgattctttttgtaagccctaggggctctaaaatggtttcacttatttatcccaaaat

SEQ ID NO: 52 - RNA, 4075 nt, synthetic construct
  source 1..4075: mol_type = other RNA
gttccctatcactctctttaatcactactcacagtaacctcaactcctgccacaatgtttgtgttcctggtgctgctgcccctggtcagcagccagtgcgtgaacctgaccacacgcacccagctgccccccgcctacaccaacagcttcaccaggggggtctactaccccgacaaggtgttcagatccagcgtgctgcacagcacccaggacctgttcctgccattcttctccaacgtgacatggttccacgtgatcagcgggaccaacggcacaaagcggttcgacaaccccgtgctgccattcaacgacggggtgtacttcgcctcaatcgagaaaagcaacatcatccgcggctggatcttcggcacaaccctcgacagcaagacccagtccctgctcatcgtgaacaacgccaccaacgtggtcatcaaggtctgcgagttccagttctgcaacgacccattcctggaccacaaaaacaacaagtcctggatggagtccgagttccgggtctactccagcgccaacaactgcaccttcgagtacgtgtctcagcccttcctgatggacctggagggaaagcagggcaacttcaagaacctgcgcgagttcgtcttcaagaacatcgacgggtacttcaaaatctacagcaagcacacccccatcatcgtgcgggagcccgaggacctgccccagggattcagcgccctggagccactggtggacctgccaatcggcatcaacatcacaaggttccagaccctgctggccctccacaggagctacctgacacccggcgacagcagctccggctggaccgccggggcagccgcctactacgtaggctacctgcagccaaggaccttcctgctgaaatacaacgagaacggcacaatcaccgacgccgtggactgcgccctggaccccctgagcgagaccaaatgcaccctgaaaagcttcaccgtggaaaaggggatctaccagaccagcaacttcagggtgcagcccaccgagagcatcgtgcgcttccccaacatcacaaacctgtgcccattcgacgaggtgttcaacgccacacgcttcgccagcgtgtacgcctggaaccggaaacgcatcagcaactgcgtggccgactacagcgtgctgtacaacctcgcccccttcttcaccttcaagtgctacggcgtcagcccaaccaagctcaacgacctctgcttcaccaacgtctacgccgacagcttcgtgatccgcggggacgaggtcaggcagatcgcccccggacagacaggcaacatcgccgactacaattacaaactgcccgacgacttcaccggctgcgtgatcgcctggaactccaacaaactggactccaaggtgagcggcaactacaactacctgtacaggctgttcaggaaaagcaacctgaagccgttcgagcgggacatctccacagagatctaccaggccgggaacaagccatgcaacggcgtcgccggcttcaactgctacttccccctgcggtcctactccttccgccccacctacggcgtcggccaccagccctaccgcgtcgtcgtgctctccttcgagctgctgcacgcccccgccaccgtgtgcgggccgaagaaaagcaccaacctggtgaaaaacaagtgcgtgaacttcaacttcaacgggctgaagggcaccggagtgctgaccgagtccaacaagaagttcctcccattccagcagttcgggagggacatcgccgacaccacagacgccgtgagggacccccagaccctggagatcctggacatcaccccctgcagcttcggcggcgtgagcgtgatcacccccgggacaaacacctccaaccaggtggccgtgctctaccagggcgtgaactgcaccgaggtgccagtcgccatccacgccgaccaactgacacccacctggagggtgtacagcaccggctccaacgtgttccagaccagggccgggtgcctcatcggcgccgaatacgtgaacaacagctacgagtgcgacatcccaatcggggccggcatctgcgccagctaccagacccagaccaagtcccacagacgcgcccgctccgtggcctcccagagcatcatcgcctacaccatgagcctgggagccgagaacagcgtcgcctacagcaacaacagcatcgccatccccacaaacttcaccatcagcgtgaccaccgagatcctgcccgtgtcgatgaccaagacatccgtggactgcacaatgtacatctgcggcgacagcacagagtgcagcaacctcctgctgcagtacggcagcttctgcacacagctgaaaagagccctgaccggcatcgccgtggagcaggacaagaacacacaggaggtgttcgcccaggtgaagcagatctacaaaaccccacccatcaagtacttcggcggattcaacttcagccagatcctgcccgaccccagcaagccctccaagagaagcttcatcgaggacctgctctttaacaaggtgaccctggccgacgccggattcatcaagcagtacggcgactgcctgggcgacatcgccgccagagacctgatctgcgcccagaaattcaaggggctgaccgtgctgccccccctgctcaccgacgagatgatcgcccagtacaccagcgccctgctcgccggcaccatcacctccggctggaccttcggcgccggagccgccctccagatccccttcgccatgcagatggcctaccgcttcaacgggatcggggtgacccagaacgtgctgtacgagaaccagaagctgatcgccaaccagttcaacagcgccatcggcaagatccaggacagcctctcgagcacagcctccgccctgggcaagctccaggacgtcgtcaaccacaatgcccaggccctgaacaccctcgtgaagcagctgtccagcaagttcggcgccatcagcagcgtgctcaacgacatcttcagccgcctcgaccccccagaagcagaggtccagatcgaccgcctgatcaccggcaggctgcagagcctgcagacctacgtgacacagcagctgatcagggccgccgagatcagggcctccgccaacctggccgccaccaaaatgagcgagtgcgtgctgggccagtccaagcgcgtggacttctgcgggaagggctaccacctgatgtccttcccacagagcgccccccacggggtggtgttcctgcacgtgacctacgtgccagcccaggagaagaacttcacaaccgccccagccatctgccacgacggcaaggcccacttcccccgcgagggggtgttcgtgtccaacggcacacactggttcgtcacacagcgcaacttctacgaaccccagatcatcaccaccgacaacacattcgtgtccggcaactgcgacgtggtgattgggatcgtgaacaacaccgtgtacgaccccctccagccagagctggacagcttcaaggaggaactggacaagtacttcaagaaccacacaagccccgacgtcgacctgggggacatcagcggcatcaacgccagcgtggtgaacatccagaaggagatcgaccggctgaacgaggtggccaagaacctgaacgagagcctcatcgacctacaggaactggggaagtacgagcagtacatcaaatggccctggtacatctggctgggcttcatcgccggcctgatcgccatcgtgatggtgaccatcatgctgtgctgcatgaccagctgctgcagctgcctgaagggctgctgcagctgcgggagctgctgcaagttcgacgaggacgactccgaacccgtgctgaaaggcgtgaagctgcactacacctgataattaagtgcttcccacttaaaacatatcaggccttctatttatttaaatatttaaattttatatttattgttgaatgtatggtttgctacctattgtaactattattcttaatcttaaaactataaatatggatcttttatgattctttttgtaagccctaggggctctaaaatggtttcacttatttatcccaaaatttcattgc

SEQ ID NO: 53 - RNA, 4203 nt, synthetic construct
  source 1..4203: mol_type = other RNA
aggagttccctatcactctctttaatcactactcacagtaacctcaactcctgccacaatgtttgtgttcctggtgctgctgcccctggtcagcagccagtgcgtgaacctgaccacacgcacccagctgccccccgcctacaccaacagcttcaccaggggggtctactaccccgacaaggtgttcagatccagcgtgctgcacagcacccaggacctgttcctgccattcttctccaacgtgacatggttccacgtgatcagcgggaccaacggcacaaagcggttcgacaaccccgtgctgccattcaacgacggggtgtacttcgcctcaatcgagaaaagcaacatcatccgcggctggatcttcggcacaaccctcgacagcaagacccagtccctgctcatcgtgaacaacgccaccaacgtggtcatcaaggtctgcgagttccagttctgcaacgacccattcctggaccacaaaaacaacaagtcctggatggagtccgagttccgggtctactccagcgccaacaactgcaccttcgagtacgtgtctcagcccttcctgatggacctggagggaaagcagggcaacttcaagaacctgcgcgagttcgtcttcaagaacatcgacgggtacttcaaaatctacagcaagcacacccccatcatcgtgcgggagcccgaggacctgccccagggattcagcgccctggagccactggtggacctgccaatcggcatcaacatcacaaggttccagaccctgctggccctccacaggagctacctgacacccggcgacagcagctccggctggaccgccggggcagccgcctactacgtaggctacctgcagccaaggaccttcctgctgaaatacaacgagaacggcacaatcaccgacgccgtggactgcgccctggaccccctgagcgagaccaaatgcaccctgaaaagcttcaccgtggaaaaggggatctaccagaccagcaacttcagggtgcagcccaccgagagcatcgtgcgcttccccaacatcacaaacctgtgcccattcgacgaggtgttcaacgccacacgcttcgccagcgtgtacgcctggaaccggaaacgcatcagcaactgcgtggccgactacagcgtgctgtacaacctcgcccccttcttcaccttcaagtgctacggcgtcagcccaaccaagctcaacgacctctgcttcaccaacgtctacgccgacagcttcgtgatccgcggggacgaggtcaggcagatcgcccccggacagacaggcaacatcgccgactacaattacaaactgcccgacgacttcaccggctgcgtgatcgcctggaactccaacaaactggactccaaggtgagcggcaactacaactacctgtacaggctgttcaggaaaagcaacctgaagccgttcgagcgggacatctccacagagatctaccaggccgggaacaagccatgcaacggcgtcgccggcttcaactgctacttccccctgcggtcctactccttccgccccacctacggcgtcggccaccagccctaccgcgtcgtcgtgctctccttcgagctgctgcacgcccccgccaccgtgtgcgggccgaagaaaagcaccaacctggtgaaaaacaagtgcgtgaacttcaacttcaacgggctgaagggcaccggagtgctgaccgagtccaacaagaagttcctcccattccagcagttcgggagggacatcgccgacaccacagacgccgtgagggacccccagaccctggagatcctggacatcaccccctgcagcttcggcggcgtgagcgtgatcacccccgggacaaacacctccaaccaggtggccgtgctctaccagggcgtgaactgcaccgaggtgccagtcgccatccacgccgaccaactgacacccacctggagggtgtacagcaccggctccaacgtgttccagaccagggccgggtgcctcatcggcgccgaatacgtgaacaacagctacgagtgcgacatcccaatcggggccggcatctgcgccagctaccagacccagaccaagtcccacagacgcgcccgctccgtggcctcccagagcatcatcgcctacaccatgagcctgggagccgagaacagcgtcgcctacagcaacaacagcatcgccatccccacaaacttcaccatcagcgtgaccaccgagatcctgcccgtgtcgatgaccaagacatccgtggactgcacaatgtacatctgcggcgacagcacagagtgcagcaacctcctgctgcagtacggcagcttctgcacacagctgaaaagagccctgaccggcatcgccgtggagcaggacaagaacacacaggaggtgttcgcccaggtgaagcagatctacaaaaccccacccatcaagtacttcggcggattcaacttcagccagatcctgcccgaccccagcaagccctccaagagaagcttcatcgaggacctgctctttaacaaggtgaccctggccgacgccggattcatcaagcagtacggcgactgcctgggcgacatcgccgccagagacctgatctgcgcccagaaattcaaggggctgaccgtgctgccccccctgctcaccgacgagatgatcgcccagtacaccagcgccctgctcgccggcaccatcacctccggctggaccttcggcgccggagccgccctccagatccccttcgccatgcagatggcctaccgcttcaacgggatcggggtgacccagaacgtgctgtacgagaaccagaagctgatcgccaaccagttcaacagcgccatcggcaagatccaggacagcctctcgagcacagcctccgccctgggcaagctccaggacgtcgtcaaccacaatgcccaggccctgaacaccctcgtgaagcagctgtccagcaagttcggcgccatcagcagcgtgctcaacgacatcttcagccgcctcgaccccccagaagcagaggtccagatcgaccgcctgatcaccggcaggctgcagagcctgcagacctacgtgacacagcagctgatcagggccgccgagatcagggcctccgccaacctggccgccaccaaaatgagcgagtgcgtgctgggccagtccaagcgcgtggacttctgcgggaagggctaccacctgatgtccttcccacagagcgccccccacggggtggtgttcctgcacgtgacctacgtgccagcccaggagaagaacttcacaaccgccccagccatctgccacgacggcaaggcccacttcccccgcgagggggtgttcgtgtccaacggcacacactggttcgtcacacagcgcaacttctacgaaccccagatcatcaccaccgacaacacattcgtgtccggcaactgcgacgtggtgattgggatcgtgaacaacaccgtgtacgaccccctccagccagagctggacagcttcaaggaggaactggacaagtacttcaagaaccacacaagccccgacgtcgacctgggggacatcagcggcatcaacgccagcgtggtgaacatccagaaggagatcgaccggctgaacgaggtggccaagaacctgaacgagagcctcatcgacctacaggaactggggaagtacgagcagtacatcaaatggccctggtacatctggctgggcttcatcgccggcctgatcgccatcgtgatggtgaccatcatgctgtgctgcatgaccagctgctgcagctgcctgaagggctgctgcagctgcgggagctgctgcaagttcgacgaggacgactccgaacccgtgctgaaaggcgtgaagctgcactacacctgataattaagtgcttcccacttaaaacatatcaggccttctatttatttaaatatttaaattttatatttattgttgaatgtatggtttgctacctattgtaactattattcttaatcttaaaactataaatatggatcttttatgattctttttgtaagccctaggggctctaaaatggtttcacttatttatcccaaaatttcattgcaaaaaaaaaaaaaaaaaaaaaaaaaaaaaagcatatgactaaaaaaaaaaaaaaaaaaaaaaaaaaaaaaaaaaaaaaaaaaaaaaaaaaaaaaaaaaaaaaaaaaaaaaaaaaaaaaaaaaaa

SEQ ID NO: 54 - RNA, 4307 nt, synthetic construct
  source 1..4307: mol_type = other RNA
agaacgcccccaaaatctgtttctaattttacagaaatcttttgaaacttggcacggtattcaaaagtccgtggaaagaaaaaaaccttgtcctggcttcagcttccaactacaaagacagacttggtccttttcaacggttttcacagatccagtgacccacgctctgaagacagaattagctaactttcaaaaacatctggaaaaatgttcgtgttcctggtgctgctgcccctggtgagcagccagtgcgtgaacctgaccaccaggacccagctgccccccgcctacaccaacagcttcacccggggcgtgtactaccccgacaaggtgttcaggagcagcgtgctgcacagcacccaggacctgttcctgcccttcttcagcaacgtgacctggttccacgtgatcagcggcaccaacggcaccaagcggttcgacaaccccgtgctgcccttcaacgacggcgtgtacttcgccagcatcgagaaaagcaacatcatccggggctggatcttcggcaccaccctggacagcaagacccagagcctgctgatcgtgaacaacgccaccaacgtggtgatcaaggtgtgcgagttccagttctgcaacgaccccttcctggaccacaagaacaacaagagctggatggagagcgagttccgggtgtacagcagcgccaacaactgcaccttcgagtacgtgagccagcccttcctgatggacctggagggcaagcagggcaacttcaagaacctgcgggagttcgtgttcaagaacatcgacggctacttcaagatctacagcaagcacacccccatcatcgtgagggagcccgaggacctgccccagggcttcagcgccctggagcccctggtggacctgcccatcggcatcaacatcaccaggttccagaccctgctggccctgcatcggagctacctgacccccggcgatagtagcagcggctggaccgccggcgctgccgcctattacgtgggctacctgcagcccaggaccttcctactgaagtacaacgagaacggcaccatcaccgacgccgtggactgcgccctggaccccctgagcgagaccaagtgcaccctgaaaagcttcaccgtggagaagggcatctaccagaccagcaacttcagggtgcagcccaccgagagcatcgtgaggttccccaacatcaccaacctgtgccccttcgacgaggtgttcaacgccacccggttcgccagcgtgtacgcctggaaccggaagcggatcagcaactgcgtggccgactacagcgtgctgtacaacctggcccccttcttcaccttcaagtgctacggcgtgagccccaccaagctgaacgacctgtgcttcaccaacgtgtacgccgacagcttcgtgatcaggggcgacgaggtgcggcagatcgcccccggccagaccggcaacatcgccgactacaactacaagctgcccgacgacttcaccggctgcgtgatcgcctggaacagcaacaagctggacagcaaggtgagcggcaactacaactacctgtaccggctgttcaggaaaagcaacctgaagcccttcgagagggacatcagcaccgagatctaccaggccggcaacaagccctgcaacggcgtggccggcttcaactgctacttccccctgcggagctacagcttccggcccacctacggcgtgggccaccaaccctaccgggtggtggttctgagcttcgaactgctgcacgcccccgccaccgtgtgcggccccaagaaaagcaccaatctggtgaagaacaagtgcgtgaacttcaacttcaacggcctgaagggcaccggcgtgctgaccgagagcaacaagaagttcctgcccttccagcagttcggcagggacatcgccgacaccaccgacgccgtgcgggacccccagaccctggagatcctggacatcaccccctgcagcttcggcggcgtgagcgtgattacccctggcaccaacaccagcaaccaggtggccgtgctgtaccagggcgtgaactgcaccgaggtgcccgtggccatccacgcggaccagctgacccccacttggcgggtgtatagcaccggcagcaacgtgttccaaacccgggccggctgcctgatcggagccgagtatgtgaacaacagctacgagtgcgacatccccatcggcgccggcatctgcgccagctaccagacccagaccaagagccaccggagggcccggagcgtggccagccagagcatcatcgcctacaccatgagcctgggcgccgagaacagcgtggcctacagcaacaacagcatcgccatccccaccaacttcaccatcagcgtgaccaccgagatcctgcccgtgagcatgaccaagaccagcgtggactgcaccatgtacatctgcggcgacagcaccgagtgcagcaacctgctgctgcagtacggcagcttctgcacccagctgaagcgcgccctgaccggcatcgccgtggagcaggacaagaacacccaggaggtgttcgcccaggtgaagcagatctacaagaccccccccatcaagtacttcggcggcttcaacttcagccagatcctgcccgaccccagcaagcccagcaagcggagcttcatcgaggacctgctgttcaacaaggtgaccctggccgacgccggcttcatcaagcagtacggcgactgcctgggcgacatcgccgcccgggacctgatctgcgcccagaagttcaagggcctgaccgtgctgccccctctgctgaccgacgaaatgatcgcccagtacaccagtgccctgctggccggcaccataaccagcggatggaccttcggcgccggcgccgcccttcagatccccttcgccatgcagatggcctaccggttcaacggcatcggcgtgacccagaacgtgctgtacgagaaccagaagctgatcgccaaccagttcaacagcgccatcggcaagatccaggacagcctgagcagcaccgccagcgccctgggcaagctgcaggacgtggtgaaccacaacgcccaggccctgaacaccctggtgaagcagctgagcagcaagttcggcgccatcagcagcgtgctgaacgacatcttcagccggctggacccccccgaggccgaggtgcagatcgacaggctgatcactggtcggctgcagagcctgcagacctacgtgacccagcaactgatccgggccgccgagatccgcgccagcgccaacctagccgccaccaagatgagcgagtgcgtgctgggccagagcaagcgggtggacttctgcggaaaaggctaccacctgatgagcttcccccagagcgccccacacggcgtggtgttcctgcacgtgacctacgtgcccgcccaggagaagaacttcaccaccgcccccgccatctgccacgacggcaaggcccacttcccccgggagggcgtgttcgtgagcaacggcacccactggttcgtgacccagcggaacttctacgagccccagatcatcaccaccgacaacaccttcgtgagcggcaactgcgacgtggtgatcggcatcgtgaacaacaccgtgtacgaccccctgcagcccgagctggacagcttcaaggaggagctggacaagtacttcaagaaccacaccagccccgacgtggacctgggcgacatcagcggcatcaacgccagcgtggtgaacatccagaaggagatcgaccggctgaacgaggtggccaagaacctgaacgagagcctgatcgacctgcaggagctgggcaagtacgagcagtacatcaagtggccctggtacatctggctgggcttcatcgccggcctgatcgccatcgtgatggtgaccatcatgctgtgctgcatgaccagctgctgcagctgcctgaagggctgctgcagctgcggcagctgctgcaagttcgacgaggacgacagcgagcccgtgctgaagggcgtgaagctgcactacacctgataaaaacgatgcagatgcaagcctgtatcagaatctgaaaaccttatataaacccctcagacagtttgcttattttattttttatgttgtaaaatgctagtataaacaaacaaattaatgttgttctaaaggctgttaaaaaaaagatgaggactcagaagttcaagctaaatattgtttacattttctggtactctgtgaaagaagagaaaagggagtcatgcattttgctttggacacagtgttttatcacctgttcatttgaagaaaaataataaagtcagaag

SEQ ID NO: 55 - RNA, 4315 nt, synthetic construct
  source 1..4315: mol_type = other RNA
agaacgcccccaaaatctgtttctaattttacagaaatcttttgaaacttggcacggtattcaaaagtccgtggaaagaaaaaaaccttgtcctggcttcagcttccaactacaaagacagacttggtccttttcaacggttttcacagatccagtgacccacgctctgaagacagaattagctaactttcaaaaacatctggaaaaatgttcgtgttcctggtgctgctgcccctggtgagcagccagtgcgtgaacctgaccaccaggacccagctgccccccgcctacaccaacagcttcacccggggcgtgtactaccccgacaaggtgttcaggagcagcgtgctgcacagcacccaggacctgttcctgcccttcttcagcaacgtgacctggttccacgtgatcagcggcaccaacggcaccaagcggttcgacaaccccgtgctgcccttcaacgacggcgtgtacttcgccagcatcgagaaaagcaacatcatccggggctggatcttcggcaccaccctggacagcaagacccagagcctgctgatcgtgaacaacgccaccaacgtggtgatcaaggtgtgcgagttccagttctgcaacgaccccttcctggaccacaagaacaacaagagctggatggagagcgagttccgggtgtacagcagcgccaacaactgcaccttcgagtacgtgagccagcccttcctgatggacctggagggcaagcagggcaacttcaagaacctgcgggagttcgtgttcaagaacatcgacggctacttcaagatctacagcaagcacacccccatcatcgtgagggagcccgaggacctgccccagggcttcagcgccctggagcccctggtggacctgcccatcggcatcaacatcaccaggttccagaccctgctggccctgcatcggagctacctgacccccggcgatagtagcagcggctggaccgccggcgctgccgcctattacgtgggctacctgcagcccaggaccttcctactgaagtacaacgagaacggcaccatcaccgacgccgtggactgcgccctggaccccctgagcgagaccaagtgcaccctgaaaagcttcaccgtggagaagggcatctaccagaccagcaacttcagggtgcagcccaccgagagcatcgtgaggttccccaacatcaccaacctgtgccccttcgacgaggtgttcaacgccacccggttcgccagcgtgtacgcctggaaccggaagcggatcagcaactgcgtggccgactacagcgtgctgtacaacctggcccccttcttcaccttcaagtgctacggcgtgagccccaccaagctgaacgacctgtgcttcaccaacgtgtacgccgacagcttcgtgatcaggggcgacgaggtgcggcagatcgcccccggccagaccggcaacatcgccgactacaactacaagctgcccgacgacttcaccggctgcgtgatcgcctggaacagcaacaagctggacagcaaggtgagcggcaactacaactacctgtaccggctgttcaggaaaagcaacctgaagcccttcgagagggacatcagcaccgagatctaccaggccggcaacaagccctgcaacggcgtggccggcttcaactgctacttccccctgcggagctacagcttccggcccacctacggcgtgggccaccaaccctaccgggtggtggttctgagcttcgaactgctgcacgcccccgccaccgtgtgcggccccaagaaaagcaccaatctggtgaagaacaagtgcgtgaacttcaacttcaacggcctgaagggcaccggcgtgctgaccgagagcaacaagaagttcctgcccttccagcagttcggcagggacatcgccgacaccaccgacgccgtgcgggacccccagaccctggagatcctggacatcaccccctgcagcttcggcggcgtgagcgtgattacccctggcaccaacaccagcaaccaggtggccgtgctgtaccagggcgtgaactgcaccgaggtgcccgtggccatccacgcggaccagctgacccccacttggcgggtgtatagcaccggcagcaacgtgttccaaacccgggccggctgcctgatcggagccgagtatgtgaacaacagctacgagtgcgacatccccatcggcgccggcatctgcgccagctaccagacccagaccaagagccaccggagggcccggagcgtggccagccagagcatcatcgcctacaccatgagcctgggcgccgagaacagcgtggcctacagcaacaacagcatcgccatccccaccaacttcaccatcagcgtgaccaccgagatcctgcccgtgagcatgaccaagaccagcgtggactgcaccatgtacatctgcggcgacagcaccgagtgcagcaacctgctgctgcagtacggcagcttctgcacccagctgaagcgcgccctgaccggcatcgccgtggagcaggacaagaacacccaggaggtgttcgcccaggtgaagcagatctacaagaccccccccatcaagtacttcggcggcttcaacttcagccagatcctgcccgaccccagcaagcccagcaagcggagcttcatcgaggacctgctgttcaacaaggtgaccctggccgacgccggcttcatcaagcagtacggcgactgcctgggcgacatcgccgcccgggacctgatctgcgcccagaagttcaagggcctgaccgtgctgccccctctgctgaccgacgaaatgatcgcccagtacaccagtgccctgctggccggcaccataaccagcggatggaccttcggcgccggcgccgcccttcagatccccttcgccatgcagatggcctaccggttcaacggcatcggcgtgacccagaacgtgctgtacgagaaccagaagctgatcgccaaccagttcaacagcgccatcggcaagatccaggacagcctgagcagcaccgccagcgccctgggcaagctgcaggacgtggtgaaccacaacgcccaggccctgaacaccctggtgaagcagctgagcagcaagttcggcgccatcagcagcgtgctgaacgacatcttcagccggctggacccccccgaggccgaggtgcagatcgacaggctgatcactggtcggctgcagagcctgcagacctacgtgacccagcaactgatccgggccgccgagatccgcgccagcgccaacctagccgccaccaagatgagcgagtgcgtgctgggccagagcaagcgggtggacttctgcggaaaaggctaccacctgatgagcttcccccagagcgccccacacggcgtggtgttcctgcacgtgacctacgtgcccgcccaggagaagaacttcaccaccgcccccgccatctgccacgacggcaaggcccacttcccccgggagggcgtgttcgtgagcaacggcacccactggttcgtgacccagcggaacttctacgagccccagatcatcaccaccgacaacaccttcgtgagcggcaactgcgacgtggtgatcggcatcgtgaacaacaccgtgtacgaccccctgcagcccgagctggacagcttcaaggaggagctggacaagtacttcaagaaccacaccagccccgacgtggacctgggcgacatcagcggcatcaacgccagcgtggtgaacatccagaaggagatcgaccggctgaacgaggtggccaagaacctgaacgagagcctgatcgacctgcaggagctgggcaagtacgagcagtacatcaagtggccctggtacatctggctgggcttcatcgccggcctgatcgccatcgtgatggtgaccatcatgctgtgctgcatgaccagctgctgcagctgcctgaagggctgctgcagctgcggcagctgctgcaagttcgacgaggacgacagcgagcccgtgctgaagggcgtgaagctgcactacacctgataaaaacgatgcagatgcaagcctgtatcagaatctgaaaaccttatataaacccctcagacagtttgcttattttattttttatgttgtaaaatgctagtataaacaaacaaattaatgttgttctaaaggctgttaaaaaaaagatgaggactcagaagttcaagctaaatattgtttacattttctggtactctgtgaaagaagagaaaagggagtcatgcattttgctttggacacagtgttttatcacctgttcatttgaagaaaaataataaagtcagaagttcattgc

SEQ ID NO: 56 - RNA, 4443 nt, synthetic construct
  source 1..4443: mol_type = other RNA
aggaagaacgcccccaaaatctgtttctaattttacagaaatcttttgaaacttggcacggtattcaaaagtccgtggaaagaaaaaaaccttgtcctggcttcagcttccaactacaaagacagacttggtccttttcaacggttttcacagatccagtgacccacgctctgaagacagaattagctaactttcaaaaacatctggaaaaatgttcgtgttcctggtgctgctgcccctggtgagcagccagtgcgtgaacctgaccaccaggacccagctgccccccgcctacaccaacagcttcacccggggcgtgtactaccccgacaaggtgttcaggagcagcgtgctgcacagcacccaggacctgttcctgcccttcttcagcaacgtgacctggttccacgtgatcagcggcaccaacggcaccaagcggttcgacaaccccgtgctgcccttcaacgacggcgtgtacttcgccagcatcgagaaaagcaacatcatccggggctggatcttcggcaccaccctggacagcaagacccagagcctgctgatcgtgaacaacgccaccaacgtggtgatcaaggtgtgcgagttccagttctgcaacgaccccttcctggaccacaagaacaacaagagctggatggagagcgagttccgggtgtacagcagcgccaacaactgcaccttcgagtacgtgagccagcccttcctgatggacctggagggcaagcagggcaacttcaagaacctgcgggagttcgtgttcaagaacatcgacggctacttcaagatctacagcaagcacacccccatcatcgtgagggagcccgaggacctgccccagggcttcagcgccctggagcccctggtggacctgcccatcggcatcaacatcaccaggttccagaccctgctggccctgcatcggagctacctgacccccggcgatagtagcagcggctggaccgccggcgctgccgcctattacgtgggctacctgcagcccaggaccttcctactgaagtacaacgagaacggcaccatcaccgacgccgtggactgcgccctggaccccctgagcgagaccaagtgcaccctgaaaagcttcaccgtggagaagggcatctaccagaccagcaacttcagggtgcagcccaccgagagcatcgtgaggttccccaacatcaccaacctgtgccccttcgacgaggtgttcaacgccacccggttcgccagcgtgtacgcctggaaccggaagcggatcagcaactgcgtggccgactacagcgtgctgtacaacctggcccccttcttcaccttcaagtgctacggcgtgagccccaccaagctgaacgacctgtgcttcaccaacgtgtacgccgacagcttcgtgatcaggggcgacgaggtgcggcagatcgcccccggccagaccggcaacatcgccgactacaactacaagctgcccgacgacttcaccggctgcgtgatcgcctggaacagcaacaagctggacagcaaggtgagcggcaactacaactacctgtaccggctgttcaggaaaagcaacctgaagcccttcgagagggacatcagcaccgagatctaccaggccggcaacaagccctgcaacggcgtggccggcttcaactgctacttccccctgcggagctacagcttccggcccacctacggcgtgggccaccaaccctaccgggtggtggttctgagcttcgaactgctgcacgcccccgccaccgtgtgcggccccaagaaaagcaccaatctggtgaagaacaagtgcgtgaacttcaacttcaacggcctgaagggcaccggcgtgctgaccgagagcaacaagaagttcctgcccttccagcagttcggcagggacatcgccgacaccaccgacgccgtgcgggacccccagaccctggagatcctggacatcaccccctgcagcttcggcggcgtgagcgtgattacccctggcaccaacaccagcaaccaggtggccgtgctgtaccagggcgtgaactgcaccgaggtgcccgtggccatccacgcggaccagctgacccccacttggcgggtgtatagcaccggcagcaacgtgttccaaacccgggccggctgcctgatcggagccgagtatgtgaacaacagctacgagtgcgacatccccatcggcgccggcatctgcgccagctaccagacccagaccaagagccaccggagggcccggagcgtggccagccagagcatcatcgcctacaccatgagcctgggcgccgagaacagcgtggcctacagcaacaacagcatcgccatccccaccaacttcaccatcagcgtgaccaccgagatcctgcccgtgagcatgaccaagaccagcgtggactgcaccatgtacatctgcggcgacagcaccgagtgcagcaacctgctgctgcagtacggcagcttctgcacccagctgaagcgcgccctgaccggcatcgccgtggagcaggacaagaacacccaggaggtgttcgcccaggtgaagcagatctacaagaccccccccatcaagtacttcggcggcttcaacttcagccagatcctgcccgaccccagcaagcccagcaagcggagcttcatcgaggacctgctgttcaacaaggtgaccctggccgacgccggcttcatcaagcagtacggcgactgcctgggcgacatcgccgcccgggacctgatctgcgcccagaagttcaagggcctgaccgtgctgccccctctgctgaccgacgaaatgatcgcccagtacaccagtgccctgctggccggcaccataaccagcggatggaccttcggcgccggcgccgcccttcagatccccttcgccatgcagatggcctaccggttcaacggcatcggcgtgacccagaacgtgctgtacgagaaccagaagctgatcgccaaccagttcaacagcgccatcggcaagatccaggacagcctgagcagcaccgccagcgccctgggcaagctgcaggacgtggtgaaccacaacgcccaggccctgaacaccctggtgaagcagctgagcagcaagttcggcgccatcagcagcgtgctgaacgacatcttcagccggctggacccccccgaggccgaggtgcagatcgacaggctgatcactggtcggctgcagagcctgcagacctacgtgacccagcaactgatccgggccgccgagatccgcgccagcgccaacctagccgccaccaagatgagcgagtgcgtgctgggccagagcaagcgggtggacttctgcggaaaaggctaccacctgatgagcttcccccagagcgccccacacggcgtggtgttcctgcacgtgacctacgtgcccgcccaggagaagaacttcaccaccgcccccgccatctgccacgacggcaaggcccacttcccccgggagggcgtgttcgtgagcaacggcacccactggttcgtgacccagcggaacttctacgagccccagatcatcaccaccgacaacaccttcgtgagcggcaactgcgacgtggtgatcggcatcgtgaacaacaccgtgtacgaccccctgcagcccgagctggacagcttcaaggaggagctggacaagtacttcaagaaccacaccagccccgacgtggacctgggcgacatcagcggcatcaacgccagcgtggtgaacatccagaaggagatcgaccggctgaacgaggtggccaagaacctgaacgagagcctgatcgacctgcaggagctgggcaagtacgagcagtacatcaagtggccctggtacatctggctgggcttcatcgccggcctgatcgccatcgtgatggtgaccatcatgctgtgctgcatgaccagctgctgcagctgcctgaagggctgctgcagctgcggcagctgctgcaagttcgacgaggacgacagcgagcccgtgctgaagggcgtgaagctgcactacacctgataaaaacgatgcagatgcaagcctgtatcagaatctgaaaaccttatataaacccctcagacagtttgcttattttattttttatgttgtaaaatgctagtataaacaaacaaattaatgttgttctaaaggctgttaaaaaaaagatgaggactcagaagttcaagctaaatattgtttacattttctggtactctgtgaaagaagagaaaagggagtcatgcattttgctttggacacagtgttttatcacctgttcatttgaagaaaaataataaagtcagaagttcattgcaaaaaaaaaaaaaaaaaaaaaaaaaaaaaagcatatgactaaaaaaaaaaaaaaaaaaaaaaaaaaaaaaaaaaaaaaaaaaaaaaaaaaaaaaaaaaaaaaaaaaaaaaaaaaaaaaaaaaaa

SEQ ID NO: 57 - RNA, 3900 nt, synthetic construct
  source 1..3900: mol_type = other RNA
agaagctgtctatcgggctccagcggtcatgttcgtgttcctggtgctgctgcccctggtgagcagccagtgcgtgaacctgaccaccaggacccagctgccccccgcctacaccaacagcttcacccggggcgtgtactaccccgacaaggtgttcaggagcagcgtgctgcacagcacccaggacctgttcctgcccttcttcagcaacgtgacctggttccacgtgatcagcggcaccaacggcaccaagcggttcgacaaccccgtgctgcccttcaacgacggcgtgtacttcgccagcatcgagaaaagcaacatcatccggggctggatcttcggcaccaccctggacagcaagacccagagcctgctgatcgtgaacaacgccaccaacgtggtgatcaaggtgtgcgagttccagttctgcaacgaccccttcctggaccacaagaacaacaagagctggatggagagcgagttccgggtgtacagcagcgccaacaactgcaccttcgagtacgtgagccagcccttcctgatggacctggagggcaagcagggcaacttcaagaacctgcgggagttcgtgttcaagaacatcgacggctacttcaagatctacagcaagcacacccccatcatcgtgagggagcccgaggacctgccccagggcttcagcgccctggagcccctggtggacctgcccatcggcatcaacatcaccaggttccagaccctgctggccctgcatcggagctacctgacccccggcgatagtagcagcggctggaccgccggcgctgccgcctattacgtgggctacctgcagcccaggaccttcctactgaagtacaacgagaacggcaccatcaccgacgccgtggactgcgccctggaccccctgagcgagaccaagtgcaccctgaaaagcttcaccgtggagaagggcatctaccagaccagcaacttcagggtgcagcccaccgagagcatcgtgaggttccccaacatcaccaacctgtgccccttcgacgaggtgttcaacgccacccggttcgccagcgtgtacgcctggaaccggaagcggatcagcaactgcgtggccgactacagcgtgctgtacaacctggcccccttcttcaccttcaagtgctacggcgtgagccccaccaagctgaacgacctgtgcttcaccaacgtgtacgccgacagcttcgtgatcaggggcgacgaggtgcggcagatcgcccccggccagaccggcaacatcgccgactacaactacaagctgcccgacgacttcaccggctgcgtgatcgcctggaacagcaacaagctggacagcaaggtgagcggcaactacaactacctgtaccggctgttcaggaaaagcaacctgaagcccttcgagagggacatcagcaccgagatctaccaggccggcaacaagccctgcaacggcgtggccggcttcaactgctacttccccctgcggagctacagcttccggcccacctacggcgtgggccaccaaccctaccgggtggtggttctgagcttcgaactgctgcacgcccccgccaccgtgtgcggccccaagaaaagcaccaatctggtgaagaacaagtgcgtgaacttcaacttcaacggcctgaagggcaccggcgtgctgaccgagagcaacaagaagttcctgcccttccagcagttcggcagggacatcgccgacaccaccgacgccgtgcgggacccccagaccctggagatcctggacatcaccccctgcagcttcggcggcgtgagcgtgattacccctggcaccaacaccagcaaccaggtggccgtgctgtaccagggcgtgaactgcaccgaggtgcccgtggccatccacgcggaccagctgacccccacttggcgggtgtatagcaccggcagcaacgtgttccaaacccgggccggctgcctgatcggagccgagtatgtgaacaacagctacgagtgcgacatccccatcggcgccggcatctgcgccagctaccagacccagaccaagagccaccggagggcccggagcgtggccagccagagcatcatcgcctacaccatgagcctgggcgccgagaacagcgtggcctacagcaacaacagcatcgccatccccaccaacttcaccatcagcgtgaccaccgagatcctgcccgtgagcatgaccaagaccagcgtggactgcaccatgtacatctgcggcgacagcaccgagtgcagcaacctgctgctgcagtacggcagcttctgcacccagctgaagcgcgccctgaccggcatcgccgtggagcaggacaagaacacccaggaggtgttcgcccaggtgaagcagatctacaagaccccccccatcaagtacttcggcggcttcaacttcagccagatcctgcccgaccccagcaagcccagcaagcggagcttcatcgaggacctgctgttcaacaaggtgaccctggccgacgccggcttcatcaagcagtacggcgactgcctgggcgacatcgccgcccgggacctgatctgcgcccagaagttcaagggcctgaccgtgctgccccctctgctgaccgacgaaatgatcgcccagtacaccagtgccctgctggccggcaccataaccagcggatggaccttcggcgccggcgccgcccttcagatccccttcgccatgcagatggcctaccggttcaacggcatcggcgtgacccagaacgtgctgtacgagaaccagaagctgatcgccaaccagttcaacagcgccatcggcaagatccaggacagcctgagcagcaccgccagcgccctgggcaagctgcaggacgtggtgaaccacaacgcccaggccctgaacaccctggtgaagcagctgagcagcaagttcggcgccatcagcagcgtgctgaacgacatcttcagccggctggacccccccgaggccgaggtgcagatcgacaggctgatcactggtcggctgcagagcctgcagacctacgtgacccagcaactgatccgggccgccgagatccgcgccagcgccaacctagccgccaccaagatgagcgagtgcgtgctgggccagagcaagcgggtggacttctgcggaaaaggctaccacctgatgagcttcccccagagcgccccacacggcgtggtgttcctgcacgtgacctacgtgcccgcccaggagaagaacttcaccaccgcccccgccatctgccacgacggcaaggcccacttcccccgggagggcgtgttcgtgagcaacggcacccactggttcgtgacccagcggaacttctacgagccccagatcatcaccaccgacaacaccttcgtgagcggcaactgcgacgtggtgatcggcatcgtgaacaacaccgtgtacgaccccctgcagcccgagctggacagcttcaaggaggagctggacaagtacttcaagaaccacaccagccccgacgtggacctgggcgacatcagcggcatcaacgccagcgtggtgaacatccagaaggagatcgaccggctgaacgaggtggccaagaacctgaacgagagcctgatcgacctgcaggagctgggcaagtacgagcagtacatcaagtggccctggtacatctggctgggcttcatcgccggcctgatcgccatcgtgatggtgaccatcatgctgtgctgcatgaccagctgctgcagctgcctgaagggctgctgcagctgcggcagctgctgcaagttcgacgaggacgacagcgagcccgtgctgaagggcgtgaagctgcactacacctgataagccgccgctccagctttgcacgtttcgatcccaaaggccctttttagggccgacca

SEQ ID NO: 58 - RNA, 3908 nt, synthetic construct
  source 1..3908: mol_type = other RNA
agaagctgtctatcgggctccagcggtcatgttcgtgttcctggtgctgctgcccctggtgagcagccagtgcgtgaacctgaccaccaggacccagctgccccccgcctacaccaacagcttcacccggggcgtgtactaccccgacaaggtgttcaggagcagcgtgctgcacagcacccaggacctgttcctgcccttcttcagcaacgtgacctggttccacgtgatcagcggcaccaacggcaccaagcggttcgacaaccccgtgctgcccttcaacgacggcgtgtacttcgccagcatcgagaaaagcaacatcatccggggctggatcttcggcaccaccctggacagcaagacccagagcctgctgatcgtgaacaacgccaccaacgtggtgatcaaggtgtgcgagttccagttctgcaacgaccccttcctggaccacaagaacaacaagagctggatggagagcgagttccgggtgtacagcagcgccaacaactgcaccttcgagtacgtgagccagcccttcctgatggacctggagggcaagcagggcaacttcaagaacctgcgggagttcgtgttcaagaacatcgacggctacttcaagatctacagcaagcacacccccatcatcgtgagggagcccgaggacctgccccagggcttcagcgccctggagcccctggtggacctgcccatcggcatcaacatcaccaggttccagaccctgctggccctgcatcggagctacctgacccccggcgatagtagcagcggctggaccgccggcgctgccgcctattacgtgggctacctgcagcccaggaccttcctactgaagtacaacgagaacggcaccatcaccgacgccgtggactgcgccctggaccccctgagcgagaccaagtgcaccctgaaaagcttcaccgtggagaagggcatctaccagaccagcaacttcagggtgcagcccaccgagagcatcgtgaggttccccaacatcaccaacctgtgccccttcgacgaggtgttcaacgccacccggttcgccagcgtgtacgcctggaaccggaagcggatcagcaactgcgtggccgactacagcgtgctgtacaacctggcccccttcttcaccttcaagtgctacggcgtgagccccaccaagctgaacgacctgtgcttcaccaacgtgtacgccgacagcttcgtgatcaggggcgacgaggtgcggcagatcgcccccggccagaccggcaacatcgccgactacaactacaagctgcccgacgacttcaccggctgcgtgatcgcctggaacagcaacaagctggacagcaaggtgagcggcaactacaactacctgtaccggctgttcaggaaaagcaacctgaagcccttcgagagggacatcagcaccgagatctaccaggccggcaacaagccctgcaacggcgtggccggcttcaactgctacttccccctgcggagctacagcttccggcccacctacggcgtgggccaccaaccctaccgggtggtggttctgagcttcgaactgctgcacgcccccgccaccgtgtgcggccccaagaaaagcaccaatctggtgaagaacaagtgcgtgaacttcaacttcaacggcctgaagggcaccggcgtgctgaccgagagcaacaagaagttcctgcccttccagcagttcggcagggacatcgccgacaccaccgacgccgtgcgggacccccagaccctggagatcctggacatcaccccctgcagcttcggcggcgtgagcgtgattacccctggcaccaacaccagcaaccaggtggccgtgctgtaccagggcgtgaactgcaccgaggtgcccgtggccatccacgcggaccagctgacccccacttggcgggtgtatagcaccggcagcaacgtgttccaaacccgggccggctgcctgatcggagccgagtatgtgaacaacagctacgagtgcgacatccccatcggcgccggcatctgcgccagctaccagacccagaccaagagccaccggagggcccggagcgtggccagccagagcatcatcgcctacaccatgagcctgggcgccgagaacagcgtggcctacagcaacaacagcatcgccatccccaccaacttcaccatcagcgtgaccaccgagatcctgcccgtgagcatgaccaagaccagcgtggactgcaccatgtacatctgcggcgacagcaccgagtgcagcaacctgctgctgcagtacggcagcttctgcacccagctgaagcgcgccctgaccggcatcgccgtggagcaggacaagaacacccaggaggtgttcgcccaggtgaagcagatctacaagaccccccccatcaagtacttcggcggcttcaacttcagccagatcctgcccgaccccagcaagcccagcaagcggagcttcatcgaggacctgctgttcaacaaggtgaccctggccgacgccggcttcatcaagcagtacggcgactgcctgggcgacatcgccgcccgggacctgatctgcgcccagaagttcaagggcctgaccgtgctgccccctctgctgaccgacgaaatgatcgcccagtacaccagtgccctgctggccggcaccataaccagcggatggaccttcggcgccggcgccgcccttcagatccccttcgccatgcagatggcctaccggttcaacggcatcggcgtgacccagaacgtgctgtacgagaaccagaagctgatcgccaaccagttcaacagcgccatcggcaagatccaggacagcctgagcagcaccgccagcgccctgggcaagctgcaggacgtggtgaaccacaacgcccaggccctgaacaccctggtgaagcagctgagcagcaagttcggcgccatcagcagcgtgctgaacgacatcttcagccggctggacccccccgaggccgaggtgcagatcgacaggctgatcactggtcggctgcagagcctgcagacctacgtgacccagcaactgatccgggccgccgagatccgcgccagcgccaacctagccgccaccaagatgagcgagtgcgtgctgggccagagcaagcgggtggacttctgcggaaaaggctaccacctgatgagcttcccccagagcgccccacacggcgtggtgttcctgcacgtgacctacgtgcccgcccaggagaagaacttcaccaccgcccccgccatctgccacgacggcaaggcccacttcccccgggagggcgtgttcgtgagcaacggcacccactggttcgtgacccagcggaacttctacgagccccagatcatcaccaccgacaacaccttcgtgagcggcaactgcgacgtggtgatcggcatcgtgaacaacaccgtgtacgaccccctgcagcccgagctggacagcttcaaggaggagctggacaagtacttcaagaaccacaccagccccgacgtggacctgggcgacatcagcggcatcaacgccagcgtggtgaacatccagaaggagatcgaccggctgaacgaggtggccaagaacctgaacgagagcctgatcgacctgcaggagctgggcaagtacgagcagtacatcaagtggccctggtacatctggctgggcttcatcgccggcctgatcgccatcgtgatggtgaccatcatgctgtgctgcatgaccagctgctgcagctgcctgaagggctgctgcagctgcggcagctgctgcaagttcgacgaggacgacagcgagcccgtgctgaagggcgtgaagctgcactacacctgataagccgccgctccagctttgcacgtttcgatcccaaaggccctttttagggccgaccattcattgc

SEQ ID NO: 59 - RNA, 4035 nt, synthetic construct
  source 1..4035: mol_type = other RNA
aggagaagctgtctatcgggctccagcggtcatgttcgtgttcctggtgctgctgcccctggtgagcagccagtgcgtgaacctgaccaccaggacccagctgccccccgcctacaccaacagcttcacccggggcgtgtactaccccgacaaggtgttcaggagcagcgtgctgcacagcacccaggacctgttcctgcccttcttcagcaacgtgacctggttccacgtgatcagcggcaccaacggcaccaagcggttcgacaaccccgtgctgcccttcaacgacggcgtgtacttcgccagcatcgagaaaagcaacatcatccggggctggatcttcggcaccaccctggacagcaagacccagagcctgctgatcgtgaacaacgccaccaacgtggtgatcaaggtgtgcgagttccagttctgcaacgaccccttcctggaccacaagaacaacaagagctggatggagagcgagttccgggtgtacagcagcgccaacaactgcaccttcgagtacgtgagccagcccttcctgatggacctggagggcaagcagggcaacttcaagaacctgcgggagttcgtgttcaagaacatcgacggctacttcaagatctacagcaagcacacccccatcatcgtgagggagcccgaggacctgccccagggcttcagcgccctggagcccctggtggacctgcccatcggcatcaacatcaccaggttccagaccctgctggccctgcatcggagctacctgacccccggcgatagtagcagcggctggaccgccggcgctgccgcctattacgtgggctacctgcagcccaggaccttcctactgaagtacaacgagaacggcaccatcaccgacgccgtggactgcgccctggaccccctgagcgagaccaagtgcaccctgaaaagcttcaccgtggagaagggcatctaccagaccagcaacttcagggtgcagcccaccgagagcatcgtgaggttccccaacatcaccaacctgtgccccttcgacgaggtgttcaacgccacccggttcgccagcgtgtacgcctggaaccggaagcggatcagcaactgcgtggccgactacagcgtgctgtacaacctggcccccttcttcaccttcaagtgctacggcgtgagccccaccaagctgaacgacctgtgcttcaccaacgtgtacgccgacagcttcgtgatcaggggcgacgaggtgcggcagatcgcccccggccagaccggcaacatcgccgactacaactacaagctgcccgacgacttcaccggctgcgtgatcgcctggaacagcaacaagctggacagcaaggtgagcggcaactacaactacctgtaccggctgttcaggaaaagcaacctgaagcccttcgagagggacatcagcaccgagatctaccaggccggcaacaagccctgcaacggcgtggccggcttcaactgctacttccccctgcggagctacagcttccggcccacctacggcgtgggccaccaaccctaccgggtggtggttctgagcttcgaactgctgcacgcccccgccaccgtgtgcggccccaagaaaagcaccaatctggtgaagaacaagtgcgtgaacttcaacttcaacggcctgaagggcaccggcgtgctgaccgagagcaacaagaagttcctgcccttccagcagttcggcagggacatcgccgacaccaccgacgccgtgcgggacccccagaccctggagatcctggacatcaccccctgcagcttcggcggcgtgagcgtgattacccctggcaccaacaccagcaaccaggtggccgtgctgtaccagggcgtgaactgcaccgaggtgcccgtggccatccacgcggaccagctgacccccacttggcgggtgtatagcaccggcagcaacgtgttccaaacccgggccggctgcctgatcggagccgagtatgtgaacaacagctacgagtgcgacatccccatcggcgccggcatctgcgccagctaccagacccagaccaagagccaccggagggcccggagcgtggccagccagagcatcatcgcctacaccatgagcctgggcgccgagaacagcgtggcctacagcaacaacagcatcgccatccccaccaacttcaccatcagcgtgaccaccgagatcctgcccgtgagcatgaccaagaccagcgtggactgcaccatgtacatctgcggcgacagcaccgagtgcagcaacctgctgctgcagtacggcagcttctgcacccagctgaagcgcgccctgaccggcatcgccgtggagcaggacaagaacacccaggaggtgttcgcccaggtgaagcagatctacaagaccccccccatcaagtacttcggcggcttcaacttcagccagatcctgcccgaccccagcaagcccagcaagcggagcttcatcgaggacctgctgttcaacaaggtgaccctggccgacgccggcttcatcaagcagtacggcgactgcctgggcgacatcgccgcccgggacctgatctgcgcccagaagttcaagggcctgaccgtgctgccccctctgctgaccgacgaaatgatcgcccagtacaccagtgccctgctggccggcaccataaccagcggatggaccttcggcgccggcgccgcccttcagatccccttcgccatgcagatggcctaccggttcaacggcatcggcgtgacccagaacgtgctgtacgagaaccagaagctgatcgccaaccagttcaacagcgccatcggcaagatccaggacagcctgagcagcaccgccagcgccctgggcaagctgcaggacgtggtgaaccacaacgcccaggccctgaacaccctggtgaagcagctgagcagcaagttcggcgccatcagcagcgtgctgaacgacatcttcagccggctggacccccccgaggccgaggtgcagatcgacaggctgatcactggtcggctgcagagcctgcagacctacgtgacccagcaactgatccgggccgccgagatccgcgccagcgccaacctagccgccaccaagatgagcgagtgcgtgctgggccagagcaagcgggtggacttctgcggaaaaggctaccacctgatgagcttcccccagagcgccccacacggcgtggtgttcctgcacgtgacctacgtgcccgcccaggagaagaacttcaccaccgcccccgccatctgccacgacggcaaggcccacttcccccgggagggcgtgttcgtgagcaacggcacccactggttcgtgacccagcggaacttctacgagccccagatcatcaccaccgacaacaccttcgtgagcggcaactgcgacgtggtgatcggcatcgtgaacaacaccgtgtacgaccccctgcagcccgagctggacagcttcaaggaggagctggacaagtacttcaagaaccacaccagccccgacgtggacctgggcgacatcagcggcatcaacgccagcgtggtgaacatccagaaggagatcgaccggctgaacgaggtggccaagaacctgaacgagagcctgatcgacctgcaggagctgggcaagtacgagcagtacatcaagtggccctggtacatctggctgggcttcatcgccggcctgatcgccatcgtgatggtgaccatcatgctgtgctgcatgaccagctgctgcagctgcctgaagggctgctgcagctgcggcagctgctgcaagttcgacgaggacgacagcgagcccgtgctgaagggcgtgaagctgcactacacctgataagccgccgctccagctttgcacgtttcgatcccaaaggccctttttagggccgaccattcattgcaaaaaaaaaaaaaaaaaaaaaaaaaaaaaagcatatgactaaaaaaaaaaaaaaaaaaaaaaaaaaaaaaaaaaaaaaaaaaaaaaaaaaaaaaaaaaaaaaaaaaaaaaaaaaaaaaaaaaaa

SEQ ID NO: 60 - RNA, 4067 nt, synthetic construct
  source 1..4067: mol_type = other RNA
gttccctatcactctctttaatcactactcacagtaacctcaactcctgccacaatgttcgtgttcctggtgctgctgcccctggtgagcagccagtgcgtgaacctgaccaccaggacccagctgccccccgcctacaccaacagcttcacccggggcgtgtactaccccgacaaggtgttcaggagcagcgtgctgcacagcacccaggacctgttcctgcccttcttcagcaacgtgacctggttccacgtgatcagcggcaccaacggcaccaagcggttcgacaaccccgtgctgcccttcaacgacggcgtgtacttcgccagcatcgagaaaagcaacatcatccggggctggatcttcggcaccaccctggacagcaagacccagagcctgctgatcgtgaacaacgccaccaacgtggtgatcaaggtgtgcgagttccagttctgcaacgaccccttcctggaccacaagaacaacaagagctggatggagagcgagttccgggtgtacagcagcgccaacaactgcaccttcgagtacgtgagccagcccttcctgatggacctggagggcaagcagggcaacttcaagaacctgcgggagttcgtgttcaagaacatcgacggctacttcaagatctacagcaagcacacccccatcatcgtgagggagcccgaggacctgccccagggcttcagcgccctggagcccctggtggacctgcccatcggcatcaacatcaccaggttccagaccctgctggccctgcatcggagctacctgacccccggcgatagtagcagcggctggaccgccggcgctgccgcctattacgtgggctacctgcagcccaggaccttcctactgaagtacaacgagaacggcaccatcaccgacgccgtggactgcgccctggaccccctgagcgagaccaagtgcaccctgaaaagcttcaccgtggagaagggcatctaccagaccagcaacttcagggtgcagcccaccgagagcatcgtgaggttccccaacatcaccaacctgtgccccttcgacgaggtgttcaacgccacccggttcgccagcgtgtacgcctggaaccggaagcggatcagcaactgcgtggccgactacagcgtgctgtacaacctggcccccttcttcaccttcaagtgctacggcgtgagccccaccaagctgaacgacctgtgcttcaccaacgtgtacgccgacagcttcgtgatcaggggcgacgaggtgcggcagatcgcccccggccagaccggcaacatcgccgactacaactacaagctgcccgacgacttcaccggctgcgtgatcgcctggaacagcaacaagctggacagcaaggtgagcggcaactacaactacctgtaccggctgttcaggaaaagcaacctgaagcccttcgagagggacatcagcaccgagatctaccaggccggcaacaagccctgcaacggcgtggccggcttcaactgctacttccccctgcggagctacagcttccggcccacctacggcgtgggccaccaaccctaccgggtggtggttctgagcttcgaactgctgcacgcccccgccaccgtgtgcggccccaagaaaagcaccaatctggtgaagaacaagtgcgtgaacttcaacttcaacggcctgaagggcaccggcgtgctgaccgagagcaacaagaagttcctgcccttccagcagttcggcagggacatcgccgacaccaccgacgccgtgcgggacccccagaccctggagatcctggacatcaccccctgcagcttcggcggcgtgagcgtgattacccctggcaccaacaccagcaaccaggtggccgtgctgtaccagggcgtgaactgcaccgaggtgcccgtggccatccacgcggaccagctgacccccacttggcgggtgtatagcaccggcagcaacgtgttccaaacccgggccggctgcctgatcggagccgagtatgtgaacaacagctacgagtgcgacatccccatcggcgccggcatctgcgccagctaccagacccagaccaagagccaccggagggcccggagcgtggccagccagagcatcatcgcctacaccatgagcctgggcgccgagaacagcgtggcctacagcaacaacagcatcgccatccccaccaacttcaccatcagcgtgaccaccgagatcctgcccgtgagcatgaccaagaccagcgtggactgcaccatgtacatctgcggcgacagcaccgagtgcagcaacctgctgctgcagtacggcagcttctgcacccagctgaagcgcgccctgaccggcatcgccgtggagcaggacaagaacacccaggaggtgttcgcccaggtgaagcagatctacaagaccccccccatcaagtacttcggcggcttcaacttcagccagatcctgcccgaccccagcaagcccagcaagcggagcttcatcgaggacctgctgttcaacaaggtgaccctggccgacgccggcttcatcaagcagtacggcgactgcctgggcgacatcgccgcccgggacctgatctgcgcccagaagttcaagggcctgaccgtgctgccccctctgctgaccgacgaaatgatcgcccagtacaccagtgccctgctggccggcaccataaccagcggatggaccttcggcgccggcgccgcccttcagatccccttcgccatgcagatggcctaccggttcaacggcatcggcgtgacccagaacgtgctgtacgagaaccagaagctgatcgccaaccagttcaacagcgccatcggcaagatccaggacagcctgagcagcaccgccagcgccctgggcaagctgcaggacgtggtgaaccacaacgcccaggccctgaacaccctggtgaagcagctgagcagcaagttcggcgccatcagcagcgtgctgaacgacatcttcagccggctggacccccccgaggccgaggtgcagatcgacaggctgatcactggtcggctgcagagcctgcagacctacgtgacccagcaactgatccgggccgccgagatccgcgccagcgccaacctagccgccaccaagatgagcgagtgcgtgctgggccagagcaagcgggtggacttctgcggaaaaggctaccacctgatgagcttcccccagagcgccccacacggcgtggtgttcctgcacgtgacctacgtgcccgcccaggagaagaacttcaccaccgcccccgccatctgccacgacggcaaggcccacttcccccgggagggcgtgttcgtgagcaacggcacccactggttcgtgacccagcggaacttctacgagccccagatcatcaccaccgacaacaccttcgtgagcggcaactgcgacgtggtgatcggcatcgtgaacaacaccgtgtacgaccccctgcagcccgagctggacagcttcaaggaggagctggacaagtacttcaagaaccacaccagccccgacgtggacctgggcgacatcagcggcatcaacgccagcgtggtgaacatccagaaggagatcgaccggctgaacgaggtggccaagaacctgaacgagagcctgatcgacctgcaggagctgggcaagtacgagcagtacatcaagtggccctggtacatctggctgggcttcatcgccggcctgatcgccatcgtgatggtgaccatcatgctgtgctgcatgaccagctgctgcagctgcctgaagggctgctgcagctgcggcagctgctgcaagttcgacgaggacgacagcgagcccgtgctgaagggcgtgaagctgcactacacctgataattaagtgcttcccacttaaaacatatcaggccttctatttatttaaatatttaaattttatatttattgttgaatgtatggtttgctacctattgtaactattattcttaatcttaaaactataaatatggatcttttatgattctttttgtaagccctaggggctctaaaatggtttcacttatttatcccaaaat

SEQ ID NO: 61 - RNA, 4075 nt, synthetic construct
  source 1..4075: mol_type = other RNA
gttccctatcactctctttaatcactactcacagtaacctcaactcctgccacaatgttcgtgttcctggtgctgctgcccctggtgagcagccagtgcgtgaacctgaccaccaggacccagctgccccccgcctacaccaacagcttcacccggggcgtgtactaccccgacaaggtgttcaggagcagcgtgctgcacagcacccaggacctgttcctgcccttcttcagcaacgtgacctggttccacgtgatcagcggcaccaacggcaccaagcggttcgacaaccccgtgctgcccttcaacgacggcgtgtacttcgccagcatcgagaaaagcaacatcatccggggctggatcttcggcaccaccctggacagcaagacccagagcctgctgatcgtgaacaacgccaccaacgtggtgatcaaggtgtgcgagttccagttctgcaacgaccccttcctggaccacaagaacaacaagagctggatggagagcgagttccgggtgtacagcagcgccaacaactgcaccttcgagtacgtgagccagcccttcctgatggacctggagggcaagcagggcaacttcaagaacctgcgggagttcgtgttcaagaacatcgacggctacttcaagatctacagcaagcacacccccatcatcgtgagggagcccgaggacctgccccagggcttcagcgccctggagcccctggtggacctgcccatcggcatcaacatcaccaggttccagaccctgctggccctgcatcggagctacctgacccccggcgatagtagcagcggctggaccgccggcgctgccgcctattacgtgggctacctgcagcccaggaccttcctactgaagtacaacgagaacggcaccatcaccgacgccgtggactgcgccctggaccccctgagcgagaccaagtgcaccctgaaaagcttcaccgtggagaagggcatctaccagaccagcaacttcagggtgcagcccaccgagagcatcgtgaggttccccaacatcaccaacctgtgccccttcgacgaggtgttcaacgccacccggttcgccagcgtgtacgcctggaaccggaagcggatcagcaactgcgtggccgactacagcgtgctgtacaacctggcccccttcttcaccttcaagtgctacggcgtgagccccaccaagctgaacgacctgtgcttcaccaacgtgtacgccgacagcttcgtgatcaggggcgacgaggtgcggcagatcgcccccggccagaccggcaacatcgccgactacaactacaagctgcccgacgacttcaccggctgcgtgatcgcctggaacagcaacaagctggacagcaaggtgagcggcaactacaactacctgtaccggctgttcaggaaaagcaacctgaagcccttcgagagggacatcagcaccgagatctaccaggccggcaacaagccctgcaacggcgtggccggcttcaactgctacttccccctgcggagctacagcttccggcccacctacggcgtgggccaccaaccctaccgggtggtggttctgagcttcgaactgctgcacgcccccgccaccgtgtgcggccccaagaaaagcaccaatctggtgaagaacaagtgcgtgaacttcaacttcaacggcctgaagggcaccggcgtgctgaccgagagcaacaagaagttcctgcccttccagcagttcggcagggacatcgccgacaccaccgacgccgtgcgggacccccagaccctggagatcctggacatcaccccctgcagcttcggcggcgtgagcgtgattacccctggcaccaacaccagcaaccaggtggccgtgctgtaccagggcgtgaactgcaccgaggtgcccgtggccatccacgcggaccagctgacccccacttggcgggtgtatagcaccggcagcaacgtgttccaaacccgggccggctgcctgatcggagccgagtatgtgaacaacagctacgagtgcgacatccccatcggcgccggcatctgcgccagctaccagacccagaccaagagccaccggagggcccggagcgtggccagccagagcatcatcgcctacaccatgagcctgggcgccgagaacagcgtggcctacagcaacaacagcatcgccatccccaccaacttcaccatcagcgtgaccaccgagatcctgcccgtgagcatgaccaagaccagcgtggactgcaccatgtacatctgcggcgacagcaccgagtgcagcaacctgctgctgcagtacggcagcttctgcacccagctgaagcgcgccctgaccggcatcgccgtggagcaggacaagaacacccaggaggtgttcgcccaggtgaagcagatctacaagaccccccccatcaagtacttcggcggcttcaacttcagccagatcctgcccgaccccagcaagcccagcaagcggagcttcatcgaggacctgctgttcaacaaggtgaccctggccgacgccggcttcatcaagcagtacggcgactgcctgggcgacatcgccgcccgggacctgatctgcgcccagaagttcaagggcctgaccgtgctgccccctctgctgaccgacgaaatgatcgcccagtacaccagtgccctgctggccggcaccataaccagcggatggaccttcggcgccggcgccgcccttcagatccccttcgccatgcagatggcctaccggttcaacggcatcggcgtgacccagaacgtgctgtacgagaaccagaagctgatcgccaaccagttcaacagcgccatcggcaagatccaggacagcctgagcagcaccgccagcgccctgggcaagctgcaggacgtggtgaaccacaacgcccaggccctgaacaccctggtgaagcagctgagcagcaagttcggcgccatcagcagcgtgctgaacgacatcttcagccggctggacccccccgaggccgaggtgcagatcgacaggctgatcactggtcggctgcagagcctgcagacctacgtgacccagcaactgatccgggccgccgagatccgcgccagcgccaacctagccgccaccaagatgagcgagtgcgtgctgggccagagcaagcgggtggacttctgcggaaaaggctaccacctgatgagcttcccccagagcgccccacacggcgtggtgttcctgcacgtgacctacgtgcccgcccaggagaagaacttcaccaccgcccccgccatctgccacgacggcaaggcccacttcccccgggagggcgtgttcgtgagcaacggcacccactggttcgtgacccagcggaacttctacgagccccagatcatcaccaccgacaacaccttcgtgagcggcaactgcgacgtggtgatcggcatcgtgaacaacaccgtgtacgaccccctgcagcccgagctggacagcttcaaggaggagctggacaagtacttcaagaaccacaccagccccgacgtggacctgggcgacatcagcggcatcaacgccagcgtggtgaacatccagaaggagatcgaccggctgaacgaggtggccaagaacctgaacgagagcctgatcgacctgcaggagctgggcaagtacgagcagtacatcaagtggccctggtacatctggctgggcttcatcgccggcctgatcgccatcgtgatggtgaccatcatgctgtgctgcatgaccagctgctgcagctgcctgaagggctgctgcagctgcggcagctgctgcaagttcgacgaggacgacagcgagcccgtgctgaagggcgtgaagctgcactacacctgataattaagtgcttcccacttaaaacatatcaggccttctatttatttaaatatttaaattttatatttattgttgaatgtatggtttgctacctattgtaactattattcttaatcttaaaactataaatatggatcttttatgattctttttgtaagccctaggggctctaaaatggtttcacttatttatcccaaaatttcattgc

SEQ ID NO: 62 - RNA, 4203 nt, synthetic construct
  source 1..4203: mol_type = other RNA
aggagttccctatcactctctttaatcactactcacagtaacctcaactcctgccacaatgttcgtgttcctggtgctgctgcccctggtgagcagccagtgcgtgaacctgaccaccaggacccagctgccccccgcctacaccaacagcttcacccggggcgtgtactaccccgacaaggtgttcaggagcagcgtgctgcacagcacccaggacctgttcctgcccttcttcagcaacgtgacctggttccacgtgatcagcggcaccaacggcaccaagcggttcgacaaccccgtgctgcccttcaacgacggcgtgtacttcgccagcatcgagaaaagcaacatcatccggggctggatcttcggcaccaccctggacagcaagacccagagcctgctgatcgtgaacaacgccaccaacgtggtgatcaaggtgtgcgagttccagttctgcaacgaccccttcctggaccacaagaacaacaagagctggatggagagcgagttccgggtgtacagcagcgccaacaactgcaccttcgagtacgtgagccagcccttcctgatggacctggagggcaagcagggcaacttcaagaacctgcgggagttcgtgttcaagaacatcgacggctacttcaagatctacagcaagcacacccccatcatcgtgagggagcccgaggacctgccccagggcttcagcgccctggagcccctggtggacctgcccatcggcatcaacatcaccaggttccagaccctgctggccctgcatcggagctacctgacccccggcgatagtagcagcggctggaccgccggcgctgccgcctattacgtgggctacctgcagcccaggaccttcctactgaagtacaacgagaacggcaccatcaccgacgccgtggactgcgccctggaccccctgagcgagaccaagtgcaccctgaaaagcttcaccgtggagaagggcatctaccagaccagcaacttcagggtgcagcccaccgagagcatcgtgaggttccccaacatcaccaacctgtgccccttcgacgaggtgttcaacgccacccggttcgccagcgtgtacgcctggaaccggaagcggatcagcaactgcgtggccgactacagcgtgctgtacaacctggcccccttcttcaccttcaagtgctacggcgtgagccccaccaagctgaacgacctgtgcttcaccaacgtgtacgccgacagcttcgtgatcaggggcgacgaggtgcggcagatcgcccccggccagaccggcaacatcgccgactacaactacaagctgcccgacgacttcaccggctgcgtgatcgcctggaacagcaacaagctggacagcaaggtgagcggcaactacaactacctgtaccggctgttcaggaaaagcaacctgaagcccttcgagagggacatcagcaccgagatctaccaggccggcaacaagccctgcaacggcgtggccggcttcaactgctacttccccctgcggagctacagcttccggcccacctacggcgtgggccaccaaccctaccgggtggtggttctgagcttcgaactgctgcacgcccccgccaccgtgtgcggccccaagaaaagcaccaatctggtgaagaacaagtgcgtgaacttcaacttcaacggcctgaagggcaccggcgtgctgaccgagagcaacaagaagttcctgcccttccagcagttcggcagggacatcgccgacaccaccgacgccgtgcgggacccccagaccctggagatcctggacatcaccccctgcagcttcggcggcgtgagcgtgattacccctggcaccaacaccagcaaccaggtggccgtgctgtaccagggcgtgaactgcaccgaggtgcccgtggccatccacgcggaccagctgacccccacttggcgggtgtatagcaccggcagcaacgtgttccaaacccgggccggctgcctgatcggagccgagtatgtgaacaacagctacgagtgcgacatccccatcggcgccggcatctgcgccagctaccagacccagaccaagagccaccggagggcccggagcgtggccagccagagcatcatcgcctacaccatgagcctgggcgccgagaacagcgtggcctacagcaacaacagcatcgccatccccaccaacttcaccatcagcgtgaccaccgagatcctgcccgtgagcatgaccaagaccagcgtggactgcaccatgtacatctgcggcgacagcaccgagtgcagcaacctgctgctgcagtacggcagcttctgcacccagctgaagcgcgccctgaccggcatcgccgtggagcaggacaagaacacccaggaggtgttcgcccaggtgaagcagatctacaagaccccccccatcaagtacttcggcggcttcaacttcagccagatcctgcccgaccccagcaagcccagcaagcggagcttcatcgaggacctgctgttcaacaaggtgaccctggccgacgccggcttcatcaagcagtacggcgactgcctgggcgacatcgccgcccgggacctgatctgcgcccagaagttcaagggcctgaccgtgctgccccctctgctgaccgacgaaatgatcgcccagtacaccagtgccctgctggccggcaccataaccagcggatggaccttcggcgccggcgccgcccttcagatccccttcgccatgcagatggcctaccggttcaacggcatcggcgtgacccagaacgtgctgtacgagaaccagaagctgatcgccaaccagttcaacagcgccatcggcaagatccaggacagcctgagcagcaccgccagcgccctgggcaagctgcaggacgtggtgaaccacaacgcccaggccctgaacaccctggtgaagcagctgagcagcaagttcggcgccatcagcagcgtgctgaacgacatcttcagccggctggacccccccgaggccgaggtgcagatcgacaggctgatcactggtcggctgcagagcctgcagacctacgtgacccagcaactgatccgggccgccgagatccgcgccagcgccaacctagccgccaccaagatgagcgagtgcgtgctgggccagagcaagcgggtggacttctgcggaaaaggctaccacctgatgagcttcccccagagcgccccacacggcgtggtgttcctgcacgtgacctacgtgcccgcccaggagaagaacttcaccaccgcccccgccatctgccacgacggcaaggcccacttcccccgggagggcgtgttcgtgagcaacggcacccactggttcgtgacccagcggaacttctacgagccccagatcatcaccaccgacaacaccttcgtgagcggcaactgcgacgtggtgatcggcatcgtgaacaacaccgtgtacgaccccctgcagcccgagctggacagcttcaaggaggagctggacaagtacttcaagaaccacaccagccccgacgtggacctgggcgacatcagcggcatcaacgccagcgtggtgaacatccagaaggagatcgaccggctgaacgaggtggccaagaacctgaacgagagcctgatcgacctgcaggagctgggcaagtacgagcagtacatcaagtggccctggtacatctggctgggcttcatcgccggcctgatcgccatcgtgatggtgaccatcatgctgtgctgcatgaccagctgctgcagctgcctgaagggctgctgcagctgcggcagctgctgcaagttcgacgaggacgacagcgagcccgtgctgaagggcgtgaagctgcactacacctgataattaagtgcttcccacttaaaacatatcaggccttctatttatttaaatatttaaattttatatttattgttgaatgtatggtttgctacctattgtaactattattcttaatcttaaaactataaatatggatcttttatgattctttttgtaagccctaggggctctaaaatggtttcacttatttatcccaaaatttcattgcaaaaaaaaaaaaaaaaaaaaaaaaaaaaaagcatatgactaaaaaaaaaaaaaaaaaaaaaaaaaaaaaaaaaaaaaaaaaaaaaaaaaaaaaaaaaaaaaaaaaaaaaaaaaaaaaaaaaaaa

SEQ ID NO: 63 - RNA, 3977 nt, synthetic construct
  source 1..3977: mol_type = other RNA
gattccccgcctcctcctgtcccgcagtcggcgtccagcggctctgcttgttcgtgtgtgtgtcgttgcaggccttattcatgtttgtgttcctggtgctgctgccactggtgagctctcagtgcgtgaatctgaccacacggacccagctgcccccagcctacaccaactcttttacaaggggagtgtattaccctgacaaggtgtttagatccagcgtgctgcacagcacccaggacctgttcctgccattcttttccaatgtgacatggttccacgtgatcagcgggacaaatggcacaaagcggttcgacaaccccgtgctgcccttcaatgatggggtgtacttcgcctccatcgagaaaagcaacatcattcgcggctggatttttggaacaaccctggatagcaagacccagtctctgctgatcgtgaataacgccacaaatgtggtgatcaaggtgtgtgagttccagttttgtaatgatccatttctggaccacaagaacaataagagctggatggaatccgaatttcgggtgtactccagcgccaataactgtacattcgaatatgtgtctcagccattcctgatggatctggagggaaagcagggcaatttcaagaatctgcgcgagttcgtgttcaagaacattgacggatacttcaagatctattctaagcatacccccatcattgtgcgggaacctgaggatctgccacaggggttcagcgccctggaacctctggtggatctgccaattggaatcaatatcacacgcttccagaccctgctggccctgcaccgctcctacctgacacccggcgattctagctctgggtggaccgccggagccgccgcctactatgtgggatacctgcagccccgcaccttcctgctgaagtataatgaaaacggcaccattaccgacgccgtggactgtgccctggacccactgagcgaaaccaagtgcacactgaaatccttcaccgtggaaaaagggatctaccagaccagcaacttccgcgtgcagcctaccgaaagcattgtgcgctttcccaatattacaaacctgtgtccatttgacgaggtgttcaacgccacacgcttcgccagcgtgtatgcctggaaccggaaaagaatcagcaactgtgtggccgattacagcgtgctgtacaatctggccccatttttcaccttcaaatgttacggggtgagccctaccaagctgaacgatctgtgtttcaccaacgtgtatgccgattctttcgtgatccgcggggacgaggtgaggcagattgcccctggacagacaggaaatattgccgactataattataaactgcccgacgatttcaccgggtgcgtgattgcctggaactccaataaactggactccaaagtgagcgggaattataactacctgtataggctgttccgcaagtccaatctgaaaccattcgagcgggacatctccacagaaatttaccaggccgggaacaagccatgcaacggcgtggccggcttcaattgttattttccactgcgctcctactcttttcggccaacatatggggtggggcatcagccctacagggtggtggtgctgtcctttgaactgctgcatgcccctgccaccgtgtgcgggcctaagaaatctaccaacctggtgaagaataaatgcgtgaatttcaatttcaatgggctgaaagggacaggcgtgctgaccgaatccaataagaaatttctgccattccagcagtttgggagggacatcgccgacacaaccgacgccgtgagggatccacagaccctggaaatcctggatattacaccctgtagcttcggcggggtgtccgtgattacaccagggacaaatacatccaaccaggtggccgtgctgtatcagggcgtgaattgtaccgaagtgcccgtggccatccatgccgaccagctgacacctacctggagggtgtatagcaccggcagcaacgtgttccagacaagagccgggtgcctgattggcgccgagtacgtgaacaatagctatgaatgcgatatcccaatcggcgccgggatctgcgcctcctaccagacccagacaaagtcccacagacgggccagatctgtggcctcccagtctattatcgcctataccatgtctctgggcgccgagaacagcgtggcctattctaacaattctattgccattcccacaaatttcacaattagcgtgaccacagaaatcctgcccgtgtctatgacaaagacctccgtggattgtacaatgtatatttgtggcgacagcacagagtgcagcaacctgctgctgcagtacggctctttctgcacacagctgaaacgcgccctgacaggtattgccgtggagcaggataaaaacacacaggaagtgtttgcccaggtgaagcagatttacaaaacaccacccattaaatacttcggcggattcaacttctcccagatcctgcctgaccccagcaaaccttccaagagaagctttatcgaggacctgctgtttaacaaagtgaccctggccgatgccggatttatcaaacagtacggggactgcctgggcgatattgccgccagagatctgatctgtgcccagaaattcaaggggctgaccgtgctgcctcccctgctgaccgacgagatgatcgcccagtacaccagcgccctgctggccggcacaatcacctctggctggaccttcggcgccggcgccgccctgcagatcccatttgccatgcagatggcctacagatttaatgggatcggggtgacacagaacgtgctgtatgagaatcagaagctgattgccaatcagttcaacagcgccatcgggaagattcaggacagcctgtctagcacagcctctgccctgggcaagctgcaggatgtggtgaaccacaatgcccaggccctgaatacactggtgaagcagctgtcctctaagtttggggccatctcctctgtgctgaatgacatcttttctagactggatcctccagaagccgaggtgcagatcgaccgcctgattaccggacgcctgcagtctctgcagacctatgtgacacagcagctgattagggccgccgagattagggcctctgccaatctggccgccaccaaaatgtccgagtgtgtgctgggacagtccaagcgggtggatttttgtgggaaagggtaccatctgatgtccttcccccagagcgcccctcacggagtggtgttcctgcacgtgacctacgtgccagcccaggagaagaactttacaaccgccccagccatctgccacgatgggaaggcccacttcccccgcgaaggggtgttcgtgtctaatgggacccactggtttgtgacacagcgcaacttttacgaacctcagattatcacaaccgacaatacattcgtgtccgggaattgtgatgtggtgattggaattgtgaacaataccgtgtacgatcccctgcagcccgagctggactcttttaaagaggaactggataaatactttaagaaccacacctcccccgacgtggacctgggggacatttctggaattaatgccagcgtggtgaatattcagaaagagattgacaggctgaacgaggtggccaagaatctgaacgaaagcctgatcgacctgcaggaactgggaaagtatgaacagtacattaaatggccctggtacatctggctgggctttatcgccggcctgatcgccatcgtgatggtgaccattatgctgtgttgcatgacaagctgctgttcttgtctgaagggctgctgtagctgtgggagctgttgcaagttcgacgaggacgattccgaacccgtgctgaaaggagtgaagctgcactacacctgataaccctgttcccagagcccacttttttttctttttttgaaataaaatagcctgtctttcacaaaggctcttttcagagccacc

SEQ ID NO: 64 - RNA, 4111 nt, synthetic construct
  source 1..4111: mol_type = other RNA
aggattccccgcctcctcctgtcccgcagtcggcgtccagcggctctgcttgttcgtgtgtgtgtcgttgcaggccttattcatgtttgtgttcctggtgctgctgccactggtgagctctcagtgcgtgaatctgaccacacggacccagctgcccccagcctacaccaactcttttacaaggggagtgtattaccctgacaaggtgtttagatccagcgtgctgcacagcacccaggacctgttcctgccattcttttccaatgtgacatggttccacgtgatcagcgggacaaatggcacaaagcggttcgacaaccccgtgctgcccttcaatgatggggtgtacttcgcctccatcgagaaaagcaacatcattcgcggctggatttttggaacaaccctggatagcaagacccagtctctgctgatcgtgaataacgccacaaatgtggtgatcaaggtgtgtgagttccagttttgtaatgatccatttctggaccacaagaacaataagagctggatggaatccgaatttcgggtgtactccagcgccaataactgtacattcgaatatgtgtctcagccattcctgatggatctggagggaaagcagggcaatttcaagaatctgcgcgagttcgtgttcaagaacattgacggatacttcaagatctattctaagcatacccccatcattgtgcgggaacctgaggatctgccacaggggttcagcgccctggaacctctggtggatctgccaattggaatcaatatcacacgcttccagaccctgctggccctgcaccgctcctacctgacacccggcgattctagctctgggtggaccgccggagccgccgcctactatgtgggatacctgcagccccgcaccttcctgctgaagtataatgaaaacggcaccattaccgacgccgtggactgtgccctggacccactgagcgaaaccaagtgcacactgaaatccttcaccgtggaaaaagggatctaccagaccagcaacttccgcgtgcagcctaccgaaagcattgtgcgctttcccaatattacaaacctgtgtccatttgacgaggtgttcaacgccacacgcttcgccagcgtgtatgcctggaaccggaaaagaatcagcaactgtgtggccgattacagcgtgctgtacaatctggccccatttttcaccttcaaatgttacggggtgagccctaccaagctgaacgatctgtgtttcaccaacgtgtatgccgattctttcgtgatccgcggggacgaggtgaggcagattgcccctggacagacaggaaatattgccgactataattataaactgcccgacgatttcaccgggtgcgtgattgcctggaactccaataaactggactccaaagtgagcgggaattataactacctgtataggctgttccgcaagtccaatctgaaaccattcgagcgggacatctccacagaaatttaccaggccgggaacaagccatgcaacggcgtggccggcttcaattgttattttccactgcgctcctactcttttcggccaacatatggggtggggcatcagccctacagggtggtggtgctgtcctttgaactgctgcatgcccctgccaccgtgtgcgggcctaagaaatctaccaacctggtgaagaataaatgcgtgaatttcaatttcaatgggctgaaagggacaggcgtgctgaccgaatccaataagaaatttctgccattccagcagtttgggagggacatcgccgacacaaccgacgccgtgagggatccacagaccctggaaatcctggatattacaccctgtagcttcggcggggtgtccgtgattacaccagggacaaatacatccaaccaggtggccgtgctgtatcagggcgtgaattgtaccgaagtgcccgtggccatccatgccgaccagctgacacctacctggagggtgtatagcaccggcagcaacgtgttccagacaagagccgggtgcctgattggcgccgagtacgtgaacaatagctatgaatgcgatatcccaatcggcgccgggatctgcgcctcctaccagacccagacaaagtcccacagacgggccagatctgtggcctcccagtctattatcgcctataccatgtctctgggcgccgagaacagcgtggcctattctaacaattctattgccattcccacaaatttcacaattagcgtgaccacagaaatcctgcccgtgtctatgacaaagacctccgtggattgtacaatgtatatttgtggcgacagcacagagtgcagcaacctgctgctgcagtacggctctttctgcacacagctgaaacgcgccctgacaggtattgccgtggagcaggataaaaacacacaggaagtgtttgcccaggtgaagcagatttacaaaacaccacccattaaatacttcggcggattcaacttctcccagatcctgcctgaccccagcaaaccttccaagagaagctttatcgaggacctgctgtttaacaaagtgaccctggccgatgccggatttatcaaacagtacggggactgcctgggcgatattgccgccagagatctgatctgtgcccagaaattcaaggggctgaccgtgctgcctcccctgctgaccgacgagatgatcgcccagtacaccagcgccctgctggccggcacaatcacctctggctggaccttcggcgccggcgccgccctgcagatcccatttgccatgcagatggcctacagatttaatgggatcggggtgacacagaacgtgctgtatgagaatcagaagctgattgccaatcagttcaacagcgccatcgggaagattcaggacagcctgtctagcacagcctctgccctgggcaagctgcaggatgtggtgaaccacaatgcccaggccctgaatacactggtgaagcagctgtcctctaagtttggggccatctcctctgtgctgaatgacatcttttctagactggatcctccagaagccgaggtgcagatcgaccgcctgattaccggacgcctgcagtctctgcagacctatgtgacacagcagctgattagggccgccgagattagggcctctgccaatctggccgccaccaaaatgtccgagtgtgtgctgggacagtccaagcgggtggatttttgtgggaaagggtaccatctgatgtccttcccccagagcgcccctcacggagtggtgttcctgcacgtgacctacgtgccagcccaggagaagaactttacaaccgccccagccatctgccacgatgggaaggcccacttcccccgcgaaggggtgttcgtgtctaatgggacccactggtttgtgacacagcgcaacttttacgaacctcagattatcacaaccgacaatacattcgtgtccgggaattgtgatgtggtgattggaattgtgaacaataccgtgtacgatcccctgcagcccgagctggactcttttaaagaggaactggataaatactttaagaaccacacctcccccgacgtggacctgggggacatttctggaattaatgccagcgtggtgaatattcagaaagagattgacaggctgaacgaggtggccaagaatctgaacgaaagcctgatcgacctgcaggaactgggaaagtatgaacagtacattaaatggccctggtacatctggctgggctttatcgccggcctgatcgccatcgtgatggtgaccattatgctgtgttgcatgacaagctgctgttcttgtctgaagggctgctgtagctgtgggagctgttgcaagttcgacgaggacgattccgaacccgtgctgaaaggagtgaagctgcactacacctgataaccctgttcccagagcccacttttttttctttttttgaaataaaatagcctgtctttcacaaaggctcttttcagagccaccttcattgcaaaaaaaaaaaaaaaaaaaaaaaaaaaaaagcatatgactaaaaaaaaaaaaaaaaaaaaaaaaaaaaaaaaaaaaaaaaaaaaaaaaaaaaaaaaaaaaaaaaaaaaaaaaaaaaaaaaaaaa

SEQ ID NO: 65 - RNA, 3979 nt, synthetic construct
  source 1..3979: mol_type = other RNA
gggaaataagagagaaaagaagagtaagaagaaatataagagccaccatgtttgtgttcctggtgctgctgccactggtgagctctcagtgcgtgaatctgaccacacggacccagctgcccccagcctacaccaactcttttacaaggggagtgtattaccctgacaaggtgtttagatccagcgtgctgcacagcacccaggacctgttcctgccattcttttccaatgtgacatggttccacgccatccacgtgtctggaaccaatggaaccaagagattcgacaaccccgtgctgccctttaatgatggcgtgtacttcgccagcaccgagaaaagcaatatcattcgcgggtggattttcggaaccacactggactctaagacccagagcctgctgattgtgaacaatgccaccaacgtggtgattaaggtgtgtgagtttcagttctgtaatgaccccttcctgggagtgtattaccacaagaacaataaatcctggatggaatccgagttccgcgtgtactcttccgccaacaattgcacatttgagtacgtgtcccagccttttctgatggacctggagggcaagcagggaaattttaagaatctgagagaatttgtgttcaagaacatcgacggctacttcaagatttattctaagcatacacctatcaatctggtgcgcgatctgccacaggggttcagcgccctggaacctctggtggatctgccaattggaatcaatatcacacgcttccagaccctgctggccctgcaccgctcctacctgacacccggcgattctagctctgggtggaccgccggagccgccgcctactatgtgggatacctgcagccccgcaccttcctgctgaagtataatgaaaacggcaccattaccgacgccgtggactgtgccctggacccactgagcgaaaccaagtgcacactgaaatccttcaccgtggaaaaagggatctaccagaccagcaacttccgcgtgcagcctaccgaaagcattgtgcgctttcccaatattacaaacctgtgtccatttggcgaggtgttcaacgccacacgcttcgccagcgtgtatgcctggaaccggaaaagaatcagcaactgtgtggccgattacagcgtgctgtacaatagcgcctctttttccacatttaaatgttacggggtgtcccctacaaagctgaatgacctgtgtttcaccaatgtgtatgccgacagcttcgtgattagaggcgacgaggtgcggcagatcgccccaggacagacaggcaaaattgccgattataactacaaactgccagatgactttaccgggtgcgtgatcgcctggaatagcaacaatctggacagcaaagtggggggcaattacaactatctgtacagactgtttcgcaagtctaacctgaaaccattcgagagggacattagcacagagatctatcaggccggatccacaccatgtaacggcgtggaaggctttaattgttactttcccctgcagtcctatgggtttcagccaacaaatggggtggggtatcagccctacagggtggtggtgctgtcctttgaactgctgcatgcccctgccaccgtgtgcgggcctaagaaatctaccaacctggtgaagaataaatgcgtgaatttcaatttcaatgggctgacagggacaggcgtgctgaccgaatccaataagaaatttctgccattccagcagtttgggagggacatcgccgacacaaccgacgccgtgagggatccacagaccctggaaatcctggatattacaccctgtagcttcggcggggtgtccgtgattacaccagggacaaatacatccaaccaggtggccgtgctgtatcaggacgtgaattgtaccgaagtgcccgtggccatccatgccgaccagctgacacctacctggagggtgtatagcaccggcagcaacgtgttccagacaagagccgggtgcctgattggcgccgagcacgtgaacaatagctatgaatgcgatatcccaatcggcgccgggatctgcgcctcctaccagacccagacaaattcccccggatctgccagctctgtggcctcccagtctattatcgcctataccatgtctctgggcgccgagaacagcgtggcctattctaacaattctattgccattcccacaaatttcacaattagcgtgaccacagaaatcctgcccgtgtctatgacaaagacctccgtggattgtacaatgtatatttgtggcgacagcacagagtgcagcaacctgctgctgcagtacggctctttctgcacacagctgaaccgcgccctgacaggtattgccgtggagcaggataaaaacacacaggaagtgtttgcccaggtgaagcagatttacaaaacaccacccattaaagacttcggcggattcaacttctcccagatcctgcctgaccccagcaaaccttccaagagaagctttatcgaggacctgctgtttaacaaagtgaccctggccgatgccggatttatcaaacagtacggggactgcctgggcgatattgccgccagagatctgatctgtgcccagaaattcaatgggctgaccgtgctgcctcccctgctgaccgacgagatgatcgcccagtacaccagcgccctgctggccggcacaatcacctctggctggaccttcggcgccggcgccgccctgcagatcccatttgccatgcagatggcctacagatttaatgggatcggggtgacacagaacgtgctgtatgagaatcagaagctgattgccaatcagttcaacagcgccatcgggaagattcaggacagcctgtctagcacagcctctgccctgggcaagctgcaggatgtggtgaaccagaacgcccaggccctgaataccctggtgaaacagctgtctagcaatttcggggccattagctccgtgctgaatgatatcctgagccgcctggatccacctgaggccgaagtgcagatcgacaggctgatcaccggccggctgcagagcctgcagacctatgtgacccagcagctgattagagccgccgagatccgggcctccgccaacctggccgccaccaagatgtctgaatgcgtgctgggccagtctaaacgtgtggatttttgtgggaaggggtaccatctgatgagctttccccagagcgccccccacggggtggtgttcctgcacgtgacatacgtgcctgcccaggaaaaaaattttacaaccgcccctgccatctgccacgacggaaaggcccattttccaagagagggcgtgttcgtgtctaacgggacccattggtttgtgacccagcggaacttttacgagccccagatcattaccacagataacacctttgtgagcggaaattgtgatgtggtgattggcattgtgaacaataccgtgtacgatccactgcagcctgagctggactctttcaaggaggaactggacaagtatttcaaaaatcacacatcccctgacgtggatctgggagacattagcgggattaacgcctctgtggtgaatatccagaaggagatcgaccggctgaacgaggtggccaagaatctgaatgagagcctgatcgacctgcaggaactgggaaaatacgagcagtatatcaaatggccttggtacatctggctgggcttcatcgccgggctgatcgccatcgtgatggtgacaatcatgctgtgttgcatgacctcctgctgtagctgcctgaagggctgctgttcctgcggatcttgttgcaaatttgatgaagacgattctgagcccgtgctgaaaggcgtgaaactgcactatacataggctggagcctcggtggcctagcttcttgccccttgggcctccccccagcccctcctccccttcctgcacccgtacccccgtggtctttgaataaagtctgagtgggcggc

SEQ ID NO: 66 - RNA, 4112 nt, synthetic construct
  source 1..4112: mol_type = other RNA
agggaaataagagagaaaagaagagtaagaagaaatataagagccaccatgtttgtgttcctggtgctgctgccactggtgagctctcagtgcgtgaatctgaccacacggacccagctgcccccagcctacaccaactcttttacaaggggagtgtattaccctgacaaggtgtttagatccagcgtgctgcacagcacccaggacctgttcctgccattcttttccaatgtgacatggttccacgccatccacgtgtctggaaccaatggaaccaagagattcgacaaccccgtgctgccctttaatgatggcgtgtacttcgccagcaccgagaaaagcaatatcattcgcgggtggattttcggaaccacactggactctaagacccagagcctgctgattgtgaacaatgccaccaacgtggtgattaaggtgtgtgagtttcagttctgtaatgaccccttcctgggagtgtattaccacaagaacaataaatcctggatggaatccgagttccgcgtgtactcttccgccaacaattgcacatttgagtacgtgtcccagccttttctgatggacctggagggcaagcagggaaattttaagaatctgagagaatttgtgttcaagaacatcgacggctacttcaagatttattctaagcatacacctatcaatctggtgcgcgatctgccacaggggttcagcgccctggaacctctggtggatctgccaattggaatcaatatcacacgcttccagaccctgctggccctgcaccgctcctacctgacacccggcgattctagctctgggtggaccgccggagccgccgcctactatgtgggatacctgcagccccgcaccttcctgctgaagtataatgaaaacggcaccattaccgacgccgtggactgtgccctggacccactgagcgaaaccaagtgcacactgaaatccttcaccgtggaaaaagggatctaccagaccagcaacttccgcgtgcagcctaccgaaagcattgtgcgctttcccaatattacaaacctgtgtccatttggcgaggtgttcaacgccacacgcttcgccagcgtgtatgcctggaaccggaaaagaatcagcaactgtgtggccgattacagcgtgctgtacaatagcgcctctttttccacatttaaatgttacggggtgtcccctacaaagctgaatgacctgtgtttcaccaatgtgtatgccgacagcttcgtgattagaggcgacgaggtgcggcagatcgccccaggacagacaggcaaaattgccgattataactacaaactgccagatgactttaccgggtgcgtgatcgcctggaatagcaacaatctggacagcaaagtggggggcaattacaactatctgtacagactgtttcgcaagtctaacctgaaaccattcgagagggacattagcacagagatctatcaggccggatccacaccatgtaacggcgtggaaggctttaattgttactttcccctgcagtcctatgggtttcagccaacaaatggggtggggtatcagccctacagggtggtggtgctgtcctttgaactgctgcatgcccctgccaccgtgtgcgggcctaagaaatctaccaacctggtgaagaataaatgcgtgaatttcaatttcaatgggctgacagggacaggcgtgctgaccgaatccaataagaaatttctgccattccagcagtttgggagggacatcgccgacacaaccgacgccgtgagggatccacagaccctggaaatcctggatattacaccctgtagcttcggcggggtgtccgtgattacaccagggacaaatacatccaaccaggtggccgtgctgtatcaggacgtgaattgtaccgaagtgcccgtggccatccatgccgaccagctgacacctacctggagggtgtatagcaccggcagcaacgtgttccagacaagagccgggtgcctgattggcgccgagcacgtgaacaatagctatgaatgcgatatcccaatcggcgccgggatctgcgcctcctaccagacccagacaaattcccccggatctgccagctctgtggcctcccagtctattatcgcctataccatgtctctgggcgccgagaacagcgtggcctattctaacaattctattgccattcccacaaatttcacaattagcgtgaccacagaaatcctgcccgtgtctatgacaaagacctccgtggattgtacaatgtatatttgtggcgacagcacagagtgcagcaacctgctgctgcagtacggctctttctgcacacagctgaaccgcgccctgacaggtattgccgtggagcaggataaaaacacacaggaagtgtttgcccaggtgaagcagatttacaaaacaccacccattaaagacttcggcggattcaacttctcccagatcctgcctgaccccagcaaaccttccaagagaagctttatcgaggacctgctgtttaacaaagtgaccctggccgatgccggatttatcaaacagtacggggactgcctgggcgatattgccgccagagatctgatctgtgcccagaaattcaatgggctgaccgtgctgcctcccctgctgaccgacgagatgatcgcccagtacaccagcgccctgctggccggcacaatcacctctggctggaccttcggcgccggcgccgccctgcagatcccatttgccatgcagatggcctacagatttaatgggatcggggtgacacagaacgtgctgtatgagaatcagaagctgattgccaatcagttcaacagcgccatcgggaagattcaggacagcctgtctagcacagcctctgccctgggcaagctgcaggatgtggtgaaccagaacgcccaggccctgaataccctggtgaaacagctgtctagcaatttcggggccattagctccgtgctgaatgatatcctgagccgcctggatccacctgaggccgaagtgcagatcgacaggctgatcaccggccggctgcagagcctgcagacctatgtgacccagcagctgattagagccgccgagatccgggcctccgccaacctggccgccaccaagatgtctgaatgcgtgctgggccagtctaaacgtgtggatttttgtgggaaggggtaccatctgatgagctttccccagagcgccccccacggggtggtgttcctgcacgtgacatacgtgcctgcccaggaaaaaaattttacaaccgcccctgccatctgccacgacggaaaggcccattttccaagagagggcgtgttcgtgtctaacgggacccattggtttgtgacccagcggaacttttacgagccccagatcattaccacagataacacctttgtgagcggaaattgtgatgtggtgattggcattgtgaacaataccgtgtacgatccactgcagcctgagctggactctttcaaggaggaactggacaagtatttcaaaaatcacacatcccctgacgtggatctgggagacattagcgggattaacgcctctgtggtgaatatccagaaggagatcgaccggctgaacgaggtggccaagaatctgaatgagagcctgatcgacctgcaggaactgggaaaatacgagcagtatatcaaatggccttggtacatctggctgggcttcatcgccgggctgatcgccatcgtgatggtgacaatcatgctgtgttgcatgacctcctgctgtagctgcctgaagggctgctgttcctgcggatcttgttgcaaatttgatgaagacgattctgagcccgtgctgaaaggcgtgaaactgcactatacataggctggagcctcggtggcctagcttcttgccccttgggcctccccccagcccctcctccccttcctgcacccgtacccccgtggtctttgaataaagtctgagtgggcggcttcattgcaaaaaaaaaaaaaaaaaaaaaaaaaaaaaagcatatgactaaaaaaaaaaaaaaaaaaaaaaaaaaaaaaaaaaaaaaaaaaaaaaaaaaaaaaaaaaaaaaaaaaaaaaaaaaaaaaaaaaaa

SEQ ID NO: 67 - RNA, 3991 nt, synthetic construct
  source 1..3991: mol_type = other RNA
gagaataaactagtattcttctggtccccacagactcagagagaacccgccaccatgtttgtgttcctggtgctgctgccactggtgagctctcagtgcgtgaatctgaccacacggacccagctgcccccagcctacaccaactcttttacaaggggagtgtattaccctgacaaggtgtttagatccagcgtgctgcacagcacccaggacctgttcctgccattcttttccaatgtgacatggttccacgccatccacgtgtctggaaccaatggaaccaagagattcgacaaccccgtgctgccctttaatgatggcgtgtacttcgccagcaccgagaaaagcaatatcattcgcgggtggattttcggaaccacactggactctaagacccagagcctgctgattgtgaacaatgccaccaacgtggtgattaaggtgtgtgagtttcagttctgtaatgaccccttcctgggagtgtattaccacaagaacaataaatcctggatggaatccgagttccgcgtgtactcttccgccaacaattgcacatttgagtacgtgtcccagccttttctgatggacctggagggcaagcagggaaattttaagaatctgagagaatttgtgttcaagaacatcgacggctacttcaagatttattctaagcatacacctatcaatctggtgcgcgatctgccacaggggttcagcgccctggaacctctggtggatctgccaattggaatcaatatcacacgcttccagaccctgctggccctgcaccgctcctacctgacacccggcgattctagctctgggtggaccgccggagccgccgcctactatgtgggatacctgcagccccgcaccttcctgctgaagtataatgaaaacggcaccattaccgacgccgtggactgtgccctggacccactgagcgaaaccaagtgcacactgaaatccttcaccgtggaaaaagggatctaccagaccagcaacttccgcgtgcagcctaccgaaagcattgtgcgctttcccaatattacaaacctgtgtccatttggcgaggtgttcaacgccacacgcttcgccagcgtgtatgcctggaaccggaaaagaatcagcaactgtgtggccgattacagcgtgctgtacaatagcgcctctttttccacatttaaatgttacggggtgtcccctacaaagctgaatgacctgtgtttcaccaatgtgtatgccgacagcttcgtgattagaggcgacgaggtgcggcagatcgccccaggacagacaggcaaaattgccgattataactacaaactgccagatgactttaccgggtgcgtgatcgcctggaatagcaacaatctggacagcaaagtggggggcaattacaactatctgtacagactgtttcgcaagtctaacctgaaaccattcgagagggacattagcacagagatctatcaggccggatccacaccatgtaacggcgtggaaggctttaattgttactttcccctgcagtcctatgggtttcagccaacaaatggggtggggtatcagccctacagggtggtggtgctgtcctttgaactgctgcatgcccctgccaccgtgtgcgggcctaagaaatctaccaacctggtgaagaataaatgcgtgaatttcaatttcaatgggctgacagggacaggcgtgctgaccgaatccaataagaaatttctgccattccagcagtttgggagggacatcgccgacacaaccgacgccgtgagggatccacagaccctggaaatcctggatattacaccctgtagcttcggcggggtgtccgtgattacaccagggacaaatacatccaaccaggtggccgtgctgtatcaggacgtgaattgtaccgaagtgcccgtggccatccatgccgaccagctgacacctacctggagggtgtatagcaccggcagcaacgtgttccagacaagagccgggtgcctgattggcgccgagcacgtgaacaatagctatgaatgcgatatcccaatcggcgccgggatctgcgcctcctaccagacccagacaaattcccccggatctgccagctctgtggcctcccagtctattatcgcctataccatgtctctgggcgccgagaacagcgtggcctattctaacaattctattgccattcccacaaatttcacaattagcgtgaccacagaaatcctgcccgtgtctatgacaaagacctccgtggattgtacaatgtatatttgtggcgacagcacagagtgcagcaacctgctgctgcagtacggctctttctgcacacagctgaaccgcgccctgacaggtattgccgtggagcaggataaaaacacacaggaagtgtttgcccaggtgaagcagatttacaaaacaccacccattaaagacttcggcggattcaacttctcccagatcctgcctgaccccagcaaaccttccaagagaagctttatcgaggacctgctgtttaacaaagtgaccctggccgatgccggatttatcaaacagtacggggactgcctgggcgatattgccgccagagatctgatctgtgcccagaaattcaatgggctgaccgtgctgcctcccctgctgaccgacgagatgatcgcccagtacaccagcgccctgctggccggcacaatcacctctggctggaccttcggcgccggcgccgccctgcagatcccatttgccatgcagatggcctacagatttaatgggatcggggtgacacagaacgtgctgtatgagaatcagaagctgattgccaatcagttcaacagcgccatcgggaagattcaggacagcctgtctagcacagcctctgccctgggcaagctgcaggatgtggtgaaccagaacgcccaggccctgaataccctggtgaaacagctgtctagcaatttcggggccattagctccgtgctgaatgatatcctgagccgcctggatccacctgaggccgaagtgcagatcgacaggctgatcaccggccggctgcagagcctgcagacctatgtgacccagcagctgattagagccgccgagatccgggcctccgccaacctggccgccaccaagatgtctgaatgcgtgctgggccagtctaaacgtgtggatttttgtgggaaggggtaccatctgatgagctttccccagagcgccccccacggggtggtgttcctgcacgtgacatacgtgcctgcccaggaaaaaaattttacaaccgcccctgccatctgccacgacggaaaggcccattttccaagagagggcgtgttcgtgtctaacgggacccattggtttgtgacccagcggaacttttacgagccccagatcattaccacagataacacctttgtgagcggaaattgtgatgtggtgattggcattgtgaacaataccgtgtacgatccactgcagcctgagctggactctttcaaggaggaactggacaagtatttcaaaaatcacacatcccctgacgtggatctgggagacattagcgggattaacgcctctgtggtgaatatccagaaggagatcgaccggctgaacgaggtggccaagaatctgaatgagagcctgatcgacctgcaggaactgggaaaatacgagcagtatatcaaatggccttggtacatctggctgggcttcatcgccgggctgatcgccatcgtgatggtgacaatcatgctgtgttgcatgacctcctgctgtagctgcctgaagggctgctgttcctgcggatcttgttgcaaatttgatgaagacgattctgagcccgtgctgaaaggcgtgaaactgcactatacatagccacacccccacgggaaacagcagtgattaacctttagcaataaacgaaagtttaactaagctatactaaccccagggttggtcaatttcgtgccagccacaccctggagctagc

SEQ ID NO: 68 - RNA, 4124 nt, synthetic construct
  source 1..4124: mol_type = other RNA
agagaataaactagtattcttctggtccccacagactcagagagaacccgccaccatgtttgtgttcctggtgctgctgccactggtgagctctcagtgcgtgaatctgaccacacggacccagctgcccccagcctacaccaactcttttacaaggggagtgtattaccctgacaaggtgtttagatccagcgtgctgcacagcacccaggacctgttcctgccattcttttccaatgtgacatggttccacgccatccacgtgtctggaaccaatggaaccaagagattcgacaaccccgtgctgccctttaatgatggcgtgtacttcgccagcaccgagaaaagcaatatcattcgcgggtggattttcggaaccacactggactctaagacccagagcctgctgattgtgaacaatgccaccaacgtggtgattaaggtgtgtgagtttcagttctgtaatgaccccttcctgggagtgtattaccacaagaacaataaatcctggatggaatccgagttccgcgtgtactcttccgccaacaattgcacatttgagtacgtgtcccagccttttctgatggacctggagggcaagcagggaaattttaagaatctgagagaatttgtgttcaagaacatcgacggctacttcaagatttattctaagcatacacctatcaatctggtgcgcgatctgccacaggggttcagcgccctggaacctctggtggatctgccaattggaatcaatatcacacgcttccagaccctgctggccctgcaccgctcctacctgacacccggcgattctagctctgggtggaccgccggagccgccgcctactatgtgggatacctgcagccccgcaccttcctgctgaagtataatgaaaacggcaccattaccgacgccgtggactgtgccctggacccactgagcgaaaccaagtgcacactgaaatccttcaccgtggaaaaagggatctaccagaccagcaacttccgcgtgcagcctaccgaaagcattgtgcgctttcccaatattacaaacctgtgtccatttggcgaggtgttcaacgccacacgcttcgccagcgtgtatgcctggaaccggaaaagaatcagcaactgtgtggccgattacagcgtgctgtacaatagcgcctctttttccacatttaaatgttacggggtgtcccctacaaagctgaatgacctgtgtttcaccaatgtgtatgccgacagcttcgtgattagaggcgacgaggtgcggcagatcgccccaggacagacaggcaaaattgccgattataactacaaactgccagatgactttaccgggtgcgtgatcgcctggaatagcaacaatctggacagcaaagtggggggcaattacaactatctgtacagactgtttcgcaagtctaacctgaaaccattcgagagggacattagcacagagatctatcaggccggatccacaccatgtaacggcgtggaaggctttaattgttactttcccctgcagtcctatgggtttcagccaacaaatggggtggggtatcagccctacagggtggtggtgctgtcctttgaactgctgcatgcccctgccaccgtgtgcgggcctaagaaatctaccaacctggtgaagaataaatgcgtgaatttcaatttcaatgggctgacagggacaggcgtgctgaccgaatccaataagaaatttctgccattccagcagtttgggagggacatcgccgacacaaccgacgccgtgagggatccacagaccctggaaatcctggatattacaccctgtagcttcggcggggtgtccgtgattacaccagggacaaatacatccaaccaggtggccgtgctgtatcaggacgtgaattgtaccgaagtgcccgtggccatccatgccgaccagctgacacctacctggagggtgtatagcaccggcagcaacgtgttccagacaagagccgggtgcctgattggcgccgagcacgtgaacaatagctatgaatgcgatatcccaatcggcgccgggatctgcgcctcctaccagacccagacaaattcccccggatctgccagctctgtggcctcccagtctattatcgcctataccatgtctctgggcgccgagaacagcgtggcctattctaacaattctattgccattcccacaaatttcacaattagcgtgaccacagaaatcctgcccgtgtctatgacaaagacctccgtggattgtacaatgtatatttgtggcgacagcacagagtgcagcaacctgctgctgcagtacggctctttctgcacacagctgaaccgcgccctgacaggtattgccgtggagcaggataaaaacacacaggaagtgtttgcccaggtgaagcagatttacaaaacaccacccattaaagacttcggcggattcaacttctcccagatcctgcctgaccccagcaaaccttccaagagaagctttatcgaggacctgctgtttaacaaagtgaccctggccgatgccggatttatcaaacagtacggggactgcctgggcgatattgccgccagagatctgatctgtgcccagaaattcaatgggctgaccgtgctgcctcccctgctgaccgacgagatgatcgcccagtacaccagcgccctgctggccggcacaatcacctctggctggaccttcggcgccggcgccgccctgcagatcccatttgccatgcagatggcctacagatttaatgggatcggggtgacacagaacgtgctgtatgagaatcagaagctgattgccaatcagttcaacagcgccatcgggaagattcaggacagcctgtctagcacagcctctgccctgggcaagctgcaggatgtggtgaaccagaacgcccaggccctgaataccctggtgaaacagctgtctagcaatttcggggccattagctccgtgctgaatgatatcctgagccgcctggatccacctgaggccgaagtgcagatcgacaggctgatcaccggccggctgcagagcctgcagacctatgtgacccagcagctgattagagccgccgagatccgggcctccgccaacctggccgccaccaagatgtctgaatgcgtgctgggccagtctaaacgtgtggatttttgtgggaaggggtaccatctgatgagctttccccagagcgccccccacggggtggtgttcctgcacgtgacatacgtgcctgcccaggaaaaaaattttacaaccgcccctgccatctgccacgacggaaaggcccattttccaagagagggcgtgttcgtgtctaacgggacccattggtttgtgacccagcggaacttttacgagccccagatcattaccacagataacacctttgtgagcggaaattgtgatgtggtgattggcattgtgaacaataccgtgtacgatccactgcagcctgagctggactctttcaaggaggaactggacaagtatttcaaaaatcacacatcccctgacgtggatctgggagacattagcgggattaacgcctctgtggtgaatatccagaaggagatcgaccggctgaacgaggtggccaagaatctgaatgagagcctgatcgacctgcaggaactgggaaaatacgagcagtatatcaaatggccttggtacatctggctgggcttcatcgccgggctgatcgccatcgtgatggtgacaatcatgctgtgttgcatgacctcctgctgtagctgcctgaagggctgctgttcctgcggatcttgttgcaaatttgatgaagacgattctgagcccgtgctgaaaggcgtgaaactgcactatacatagccacacccccacgggaaacagcagtgattaacctttagcaataaacgaaagtttaactaagctatactaaccccagggttggtcaatttcgtgccagccacaccctggagctagcttcattgcaaaaaaaaaaaaaaaaaaaaaaaaaaaaaagcatatgactaaaaaaaaaaaaaaaaaaaaaaaaaaaaaaaaaaaaaaaaaaaaaaaaaaaaaaaaaaaaaaaaaaaaaaaaaaaaaaaaaaaa

SEQ ID NO: 69 - RNA, 4313 nt, synthetic construct
  source 1..4313: mol_type = other RNA
agaacgcccccaaaatctgtttctaattttacagaaatcttttgaaacttggcacggtattcaaaagtccgtggaaagaaaaaaaccttgtcctggcttcagcttccaactacaaagacagacttggtccttttcaacggttttcacagatccagtgacccacgctctgaagacagaattagctaactttcaaaaacatctggaaaaatgtttgtgttcctggtgctgctgccactggtgagctctcagtgcgtgaatctgaccacacggacccagctgcccccagcctacaccaactcttttacaaggggagtgtattaccctgacaaggtgtttagatccagcgtgctgcacagcacccaggacctgttcctgccattcttttccaatgtgacatggttccacgccatccacgtgtctggaaccaatggaaccaagagattcgacaaccccgtgctgccctttaatgatggcgtgtacttcgccagcaccgagaaaagcaatatcattcgcgggtggattttcggaaccacactggactctaagacccagagcctgctgattgtgaacaatgccaccaacgtggtgattaaggtgtgtgagtttcagttctgtaatgaccccttcctgggagtgtattaccacaagaacaataaatcctggatggaatccgagttccgcgtgtactcttccgccaacaattgcacatttgagtacgtgtcccagccttttctgatggacctggagggcaagcagggaaattttaagaatctgagagaatttgtgttcaagaacatcgacggctacttcaagatttattctaagcatacacctatcaatctggtgcgcgatctgccacaggggttcagcgccctggaacctctggtggatctgccaattggaatcaatatcacacgcttccagaccctgctggccctgcaccgctcctacctgacacccggcgattctagctctgggtggaccgccggagccgccgcctactatgtgggatacctgcagccccgcaccttcctgctgaagtataatgaaaacggcaccattaccgacgccgtggactgtgccctggacccactgagcgaaaccaagtgcacactgaaatccttcaccgtggaaaaagggatctaccagaccagcaacttccgcgtgcagcctaccgaaagcattgtgcgctttcccaatattacaaacctgtgtccatttggcgaggtgttcaacgccacacgcttcgccagcgtgtatgcctggaaccggaaaagaatcagcaactgtgtggccgattacagcgtgctgtacaatagcgcctctttttccacatttaaatgttacggggtgtcccctacaaagctgaatgacctgtgtttcaccaatgtgtatgccgacagcttcgtgattagaggcgacgaggtgcggcagatcgccccaggacagacaggcaaaattgccgattataactacaaactgccagatgactttaccgggtgcgtgatcgcctggaatagcaacaatctggacagcaaagtggggggcaattacaactatctgtacagactgtttcgcaagtctaacctgaaaccattcgagagggacattagcacagagatctatcaggccggatccacaccatgtaacggcgtggaaggctttaattgttactttcccctgcagtcctatgggtttcagccaacaaatggggtggggtatcagccctacagggtggtggtgctgtcctttgaactgctgcatgcccctgccaccgtgtgcgggcctaagaaatctaccaacctggtgaagaataaatgcgtgaatttcaatttcaatgggctgacagggacaggcgtgctgaccgaatccaataagaaatttctgccattccagcagtttgggagggacatcgccgacacaaccgacgccgtgagggatccacagaccctggaaatcctggatattacaccctgtagcttcggcggggtgtccgtgattacaccagggacaaatacatccaaccaggtggccgtgctgtatcaggacgtgaattgtaccgaagtgcccgtggccatccatgccgaccagctgacacctacctggagggtgtatagcaccggcagcaacgtgttccagacaagagccgggtgcctgattggcgccgagcacgtgaacaatagctatgaatgcgatatcccaatcggcgccgggatctgcgcctcctaccagacccagacaaattcccccggatctgccagctctgtggcctcccagtctattatcgcctataccatgtctctgggcgccgagaacagcgtggcctattctaacaattctattgccattcccacaaatttcacaattagcgtgaccacagaaatcctgcccgtgtctatgacaaagacctccgtggattgtacaatgtatatttgtggcgacagcacagagtgcagcaacctgctgctgcagtacggctctttctgcacacagctgaaccgcgccctgacaggtattgccgtggagcaggataaaaacacacaggaagtgtttgcccaggtgaagcagatttacaaaacaccacccattaaagacttcggcggattcaacttctcccagatcctgcctgaccccagcaaaccttccaagagaagctttatcgaggacctgctgtttaacaaagtgaccctggccgatgccggatttatcaaacagtacggggactgcctgggcgatattgccgccagagatctgatctgtgcccagaaattcaatgggctgaccgtgctgcctcccctgctgaccgacgagatgatcgcccagtacaccagcgccctgctggccggcacaatcacctctggctggaccttcggcgccggcgccgccctgcagatcccatttgccatgcagatggcctacagatttaatgggatcggggtgacacagaacgtgctgtatgagaatcagaagctgattgccaatcagttcaacagcgccatcgggaagattcaggacagcctgtctagcacagcctctgccctgggcaagctgcaggatgtggtgaaccagaacgcccaggccctgaataccctggtgaaacagctgtctagcaatttcggggccattagctccgtgctgaatgatatcctgagccgcctggatccacctgaggccgaagtgcagatcgacaggctgatcaccggccggctgcagagcctgcagacctatgtgacccagcagctgattagagccgccgagatccgggcctccgccaacctggccgccaccaagatgtctgaatgcgtgctgggccagtctaaacgtgtggatttttgtgggaaggggtaccatctgatgagctttccccagagcgccccccacggggtggtgttcctgcacgtgacatacgtgcctgcccaggaaaaaaattttacaaccgcccctgccatctgccacgacggaaaggcccattttccaagagagggcgtgttcgtgtctaacgggacccattggtttgtgacccagcggaacttttacgagccccagatcattaccacagataacacctttgtgagcggaaattgtgatgtggtgattggcattgtgaacaataccgtgtacgatccactgcagcctgagctggactctttcaaggaggaactggacaagtatttcaaaaatcacacatcccctgacgtggatctgggagacattagcgggattaacgcctctgtggtgaatatccagaaggagatcgaccggctgaacgaggtggccaagaatctgaatgagagcctgatcgacctgcaggaactgggaaaatacgagcagtatatcaaatggccttggtacatctggctgggcttcatcgccgggctgatcgccatcgtgatggtgacaatcatgctgtgttgcatgacctcctgctgtagctgcctgaagggctgctgttcctgcggatcttgttgcaaatttgatgaagacgattctgagcccgtgctgaaaggcgtgaaactgcactatacatagaaacgatgcagatgcaagcctgtatcagaatctgaaaaccttatataaacccctcagacagtttgcttattttattttttatgttgtaaaatgctagtataaacaaacaaattaatgttgttctaaaggctgttaaaaaaaagatgaggactcagaagttcaagctaaatattgtttacattttctggtactctgtgaaagaagagaaaagggagtcatgcattttgctttggacacagtgttttatcacctgttcatttgaagaaaaataataaagtcagaag

SEQ ID NO: 70 - RNA, 4321 nt, synthetic construct
  source 1..4321: mol_type = other RNA
agaacgcccccaaaatctgtttctaattttacagaaatcttttgaaacttggcacggtattcaaaagtccgtggaaagaaaaaaaccttgtcctggcttcagcttccaactacaaagacagacttggtccttttcaacggttttcacagatccagtgacccacgctctgaagacagaattagctaactttcaaaaacatctggaaaaatgtttgtgttcctggtgctgctgccactggtgagctctcagtgcgtgaatctgaccacacggacccagctgcccccagcctacaccaactcttttacaaggggagtgtattaccctgacaaggtgtttagatccagcgtgctgcacagcacccaggacctgttcctgccattcttttccaatgtgacatggttccacgccatccacgtgtctggaaccaatggaaccaagagattcgacaaccccgtgctgccctttaatgatggcgtgtacttcgccagcaccgagaaaagcaatatcattcgcgggtggattttcggaaccacactggactctaagacccagagcctgctgattgtgaacaatgccaccaacgtggtgattaaggtgtgtgagtttcagttctgtaatgaccccttcctgggagtgtattaccacaagaacaataaatcctggatggaatccgagttccgcgtgtactcttccgccaacaattgcacatttgagtacgtgtcccagccttttctgatggacctggagggcaagcagggaaattttaagaatctgagagaatttgtgttcaagaacatcgacggctacttcaagatttattctaagcatacacctatcaatctggtgcgcgatctgccacaggggttcagcgccctggaacctctggtggatctgccaattggaatcaatatcacacgcttccagaccctgctggccctgcaccgctcctacctgacacccggcgattctagctctgggtggaccgccggagccgccgcctactatgtgggatacctgcagccccgcaccttcctgctgaagtataatgaaaacggcaccattaccgacgccgtggactgtgccctggacccactgagcgaaaccaagtgcacactgaaatccttcaccgtggaaaaagggatctaccagaccagcaacttccgcgtgcagcctaccgaaagcattgtgcgctttcccaatattacaaacctgtgtccatttggcgaggtgttcaacgccacacgcttcgccagcgtgtatgcctggaaccggaaaagaatcagcaactgtgtggccgattacagcgtgctgtacaatagcgcctctttttccacatttaaatgttacggggtgtcccctacaaagctgaatgacctgtgtttcaccaatgtgtatgccgacagcttcgtgattagaggcgacgaggtgcggcagatcgccccaggacagacaggcaaaattgccgattataactacaaactgccagatgactttaccgggtgcgtgatcgcctggaatagcaacaatctggacagcaaagtggggggcaattacaactatctgtacagactgtttcgcaagtctaacctgaaaccattcgagagggacattagcacagagatctatcaggccggatccacaccatgtaacggcgtggaaggctttaattgttactttcccctgcagtcctatgggtttcagccaacaaatggggtggggtatcagccctacagggtggtggtgctgtcctttgaactgctgcatgcccctgccaccgtgtgcgggcctaagaaatctaccaacctggtgaagaataaatgcgtgaatttcaatttcaatgggctgacagggacaggcgtgctgaccgaatccaataagaaatttctgccattccagcagtttgggagggacatcgccgacacaaccgacgccgtgagggatccacagaccctggaaatcctggatattacaccctgtagcttcggcggggtgtccgtgattacaccagggacaaatacatccaaccaggtggccgtgctgtatcaggacgtgaattgtaccgaagtgcccgtggccatccatgccgaccagctgacacctacctggagggtgtatagcaccggcagcaacgtgttccagacaagagccgggtgcctgattggcgccgagcacgtgaacaatagctatgaatgcgatatcccaatcggcgccgggatctgcgcctcctaccagacccagacaaattcccccggatctgccagctctgtggcctcccagtctattatcgcctataccatgtctctgggcgccgagaacagcgtggcctattctaacaattctattgccattcccacaaatttcacaattagcgtgaccacagaaatcctgcccgtgtctatgacaaagacctccgtggattgtacaatgtatatttgtggcgacagcacagagtgcagcaacctgctgctgcagtacggctctttctgcacacagctgaaccgcgccctgacaggtattgccgtggagcaggataaaaacacacaggaagtgtttgcccaggtgaagcagatttacaaaacaccacccattaaagacttcggcggattcaacttctcccagatcctgcctgaccccagcaaaccttccaagagaagctttatcgaggacctgctgtttaacaaagtgaccctggccgatgccggatttatcaaacagtacggggactgcctgggcgatattgccgccagagatctgatctgtgcccagaaattcaatgggctgaccgtgctgcctcccctgctgaccgacgagatgatcgcccagtacaccagcgccctgctggccggcacaatcacctctggctggaccttcggcgccggcgccgccctgcagatcccatttgccatgcagatggcctacagatttaatgggatcggggtgacacagaacgtgctgtatgagaatcagaagctgattgccaatcagttcaacagcgccatcgggaagattcaggacagcctgtctagcacagcctctgccctgggcaagctgcaggatgtggtgaaccagaacgcccaggccctgaataccctggtgaaacagctgtctagcaatttcggggccattagctccgtgctgaatgatatcctgagccgcctggatccacctgaggccgaagtgcagatcgacaggctgatcaccggccggctgcagagcctgcagacctatgtgacccagcagctgattagagccgccgagatccgggcctccgccaacctggccgccaccaagatgtctgaatgcgtgctgggccagtctaaacgtgtggatttttgtgggaaggggtaccatctgatgagctttccccagagcgccccccacggggtggtgttcctgcacgtgacatacgtgcctgcccaggaaaaaaattttacaaccgcccctgccatctgccacgacggaaaggcccattttccaagagagggcgtgttcgtgtctaacgggacccattggtttgtgacccagcggaacttttacgagccccagatcattaccacagataacacctttgtgagcggaaattgtgatgtggtgattggcattgtgaacaataccgtgtacgatccactgcagcctgagctggactctttcaaggaggaactggacaagtatttcaaaaatcacacatcccctgacgtggatctgggagacattagcgggattaacgcctctgtggtgaatatccagaaggagatcgaccggctgaacgaggtggccaagaatctgaatgagagcctgatcgacctgcaggaactgggaaaatacgagcagtatatcaaatggccttggtacatctggctgggcttcatcgccgggctgatcgccatcgtgatggtgacaatcatgctgtgttgcatgacctcctgctgtagctgcctgaagggctgctgttcctgcggatcttgttgcaaatttgatgaagacgattctgagcccgtgctgaaaggcgtgaaactgcactatacatagaaacgatgcagatgcaagcctgtatcagaatctgaaaaccttatataaacccctcagacagtttgcttattttattttttatgttgtaaaatgctagtataaacaaacaaattaatgttgttctaaaggctgttaaaaaaaagatgaggactcagaagttcaagctaaatattgtttacattttctggtactctgtgaaagaagagaaaagggagtcatgcattttgctttggacacagtgttttatcacctgttcatttgaagaaaaataataaagtcagaagttcattgc

SEQ ID NO: 71 - RNA, 4449 nt, synthetic construct
  source 1..4449: mol_type = other RNA
aggaagaacgcccccaaaatctgtttctaattttacagaaatcttttgaaacttggcacggtattcaaaagtccgtggaaagaaaaaaaccttgtcctggcttcagcttccaactacaaagacagacttggtccttttcaacggttttcacagatccagtgacccacgctctgaagacagaattagctaactttcaaaaacatctggaaaaatgtttgtgttcctggtgctgctgccactggtgagctctcagtgcgtgaatctgaccacacggacccagctgcccccagcctacaccaactcttttacaaggggagtgtattaccctgacaaggtgtttagatccagcgtgctgcacagcacccaggacctgttcctgccattcttttccaatgtgacatggttccacgccatccacgtgtctggaaccaatggaaccaagagattcgacaaccccgtgctgccctttaatgatggcgtgtacttcgccagcaccgagaaaagcaatatcattcgcgggtggattttcggaaccacactggactctaagacccagagcctgctgattgtgaacaatgccaccaacgtggtgattaaggtgtgtgagtttcagttctgtaatgaccccttcctgggagtgtattaccacaagaacaataaatcctggatggaatccgagttccgcgtgtactcttccgccaacaattgcacatttgagtacgtgtcccagccttttctgatggacctggagggcaagcagggaaattttaagaatctgagagaatttgtgttcaagaacatcgacggctacttcaagatttattctaagcatacacctatcaatctggtgcgcgatctgccacaggggttcagcgccctggaacctctggtggatctgccaattggaatcaatatcacacgcttccagaccctgctggccctgcaccgctcctacctgacacccggcgattctagctctgggtggaccgccggagccgccgcctactatgtgggatacctgcagccccgcaccttcctgctgaagtataatgaaaacggcaccattaccgacgccgtggactgtgccctggacccactgagcgaaaccaagtgcacactgaaatccttcaccgtggaaaaagggatctaccagaccagcaacttccgcgtgcagcctaccgaaagcattgtgcgctttcccaatattacaaacctgtgtccatttggcgaggtgttcaacgccacacgcttcgccagcgtgtatgcctggaaccggaaaagaatcagcaactgtgtggccgattacagcgtgctgtacaatagcgcctctttttccacatttaaatgttacggggtgtcccctacaaagctgaatgacctgtgtttcaccaatgtgtatgccgacagcttcgtgattagaggcgacgaggtgcggcagatcgccccaggacagacaggcaaaattgccgattataactacaaactgccagatgactttaccgggtgcgtgatcgcctggaatagcaacaatctggacagcaaagtggggggcaattacaactatctgtacagactgtttcgcaagtctaacctgaaaccattcgagagggacattagcacagagatctatcaggccggatccacaccatgtaacggcgtggaaggctttaattgttactttcccctgcagtcctatgggtttcagccaacaaatggggtggggtatcagccctacagggtggtggtgctgtcctttgaactgctgcatgcccctgccaccgtgtgcgggcctaagaaatctaccaacctggtgaagaataaatgcgtgaatttcaatttcaatgggctgacagggacaggcgtgctgaccgaatccaataagaaatttctgccattccagcagtttgggagggacatcgccgacacaaccgacgccgtgagggatccacagaccctggaaatcctggatattacaccctgtagcttcggcggggtgtccgtgattacaccagggacaaatacatccaaccaggtggccgtgctgtatcaggacgtgaattgtaccgaagtgcccgtggccatccatgccgaccagctgacacctacctggagggtgtatagcaccggcagcaacgtgttccagacaagagccgggtgcctgattggcgccgagcacgtgaacaatagctatgaatgcgatatcccaatcggcgccgggatctgcgcctcctaccagacccagacaaattcccccggatctgccagctctgtggcctcccagtctattatcgcctataccatgtctctgggcgccgagaacagcgtggcctattctaacaattctattgccattcccacaaatttcacaattagcgtgaccacagaaatcctgcccgtgtctatgacaaagacctccgtggattgtacaatgtatatttgtggcgacagcacagagtgcagcaacctgctgctgcagtacggctctttctgcacacagctgaaccgcgccctgacaggtattgccgtggagcaggataaaaacacacaggaagtgtttgcccaggtgaagcagatttacaaaacaccacccattaaagacttcggcggattcaacttctcccagatcctgcctgaccccagcaaaccttccaagagaagctttatcgaggacctgctgtttaacaaagtgaccctggccgatgccggatttatcaaacagtacggggactgcctgggcgatattgccgccagagatctgatctgtgcccagaaattcaatgggctgaccgtgctgcctcccctgctgaccgacgagatgatcgcccagtacaccagcgccctgctggccggcacaatcacctctggctggaccttcggcgccggcgccgccctgcagatcccatttgccatgcagatggcctacagatttaatgggatcggggtgacacagaacgtgctgtatgagaatcagaagctgattgccaatcagttcaacagcgccatcgggaagattcaggacagcctgtctagcacagcctctgccctgggcaagctgcaggatgtggtgaaccagaacgcccaggccctgaataccctggtgaaacagctgtctagcaatttcggggccattagctccgtgctgaatgatatcctgagccgcctggatccacctgaggccgaagtgcagatcgacaggctgatcaccggccggctgcagagcctgcagacctatgtgacccagcagctgattagagccgccgagatccgggcctccgccaacctggccgccaccaagatgtctgaatgcgtgctgggccagtctaaacgtgtggatttttgtgggaaggggtaccatctgatgagctttccccagagcgccccccacggggtggtgttcctgcacgtgacatacgtgcctgcccaggaaaaaaattttacaaccgcccctgccatctgccacgacggaaaggcccattttccaagagagggcgtgttcgtgtctaacgggacccattggtttgtgacccagcggaacttttacgagccccagatcattaccacagataacacctttgtgagcggaaattgtgatgtggtgattggcattgtgaacaataccgtgtacgatccactgcagcctgagctggactctttcaaggaggaactggacaagtatttcaaaaatcacacatcccctgacgtggatctgggagacattagcgggattaacgcctctgtggtgaatatccagaaggagatcgaccggctgaacgaggtggccaagaatctgaatgagagcctgatcgacctgcaggaactgggaaaatacgagcagtatatcaaatggccttggtacatctggctgggcttcatcgccgggctgatcgccatcgtgatggtgacaatcatgctgtgttgcatgacctcctgctgtagctgcctgaagggctgctgttcctgcggatcttgttgcaaatttgatgaagacgattctgagcccgtgctgaaaggcgtgaaactgcactatacatagaaacgatgcagatgcaagcctgtatcagaatctgaaaaccttatataaacccctcagacagtttgcttattttattttttatgttgtaaaatgctagtataaacaaacaaattaatgttgttctaaaggctgttaaaaaaaagatgaggactcagaagttcaagctaaatattgtttacattttctggtactctgtgaaagaagagaaaagggagtcatgcattttgctttggacacagtgttttatcacctgttcatttgaagaaaaataataaagtcagaagttcattgcaaaaaaaaaaaaaaaaaaaaaaaaaaaaaagcatatgactaaaaaaaaaaaaaaaaaaaaaaaaaaaaaaaaaaaaaaaaaaaaaaaaaaaaaaaaaaaaaaaaaaaaaaaaaaaaaaaaaaaa

SEQ ID NO: 72 - RNA, 3905 nt, synthetic construct
  source 1..3905: mol_type = other RNA
agaagctgtctatcgggctccagcggtcatgtttgtgttcctggtgctgctgccactggtgagctctcagtgcgtgaatctgaccacacggacccagctgcccccagcctacaccaactcttttacaaggggagtgtattaccctgacaaggtgtttagatccagcgtgctgcacagcacccaggacctgttcctgccattcttttccaatgtgacatggttccacgccatccacgtgtctggaaccaatggaaccaagagattcgacaaccccgtgctgccctttaatgatggcgtgtacttcgccagcaccgagaaaagcaatatcattcgcgggtggattttcggaaccacactggactctaagacccagagcctgctgattgtgaacaatgccaccaacgtggtgattaaggtgtgtgagtttcagttctgtaatgaccccttcctgggagtgtattaccacaagaacaataaatcctggatggaatccgagttccgcgtgtactcttccgccaacaattgcacatttgagtacgtgtcccagccttttctgatggacctggagggcaagcagggaaattttaagaatctgagagaatttgtgttcaagaacatcgacggctacttcaagatttattctaagcatacacctatcaatctggtgcgcgatctgccacaggggttcagcgccctggaacctctggtggatctgccaattggaatcaatatcacacgcttccagaccctgctggccctgcaccgctcctacctgacacccggcgattctagctctgggtggaccgccggagccgccgcctactatgtgggatacctgcagccccgcaccttcctgctgaagtataatgaaaacggcaccattaccgacgccgtggactgtgccctggacccactgagcgaaaccaagtgcacactgaaatccttcaccgtggaaaaagggatctaccagaccagcaacttccgcgtgcagcctaccgaaagcattgtgcgctttcccaatattacaaacctgtgtccatttggcgaggtgttcaacgccacacgcttcgccagcgtgtatgcctggaaccggaaaagaatcagcaactgtgtggccgattacagcgtgctgtacaatagcgcctctttttccacatttaaatgttacggggtgtcccctacaaagctgaatgacctgtgtttcaccaatgtgtatgccgacagcttcgtgattagaggcgacgaggtgcggcagatcgccccaggacagacaggcaaaattgccgattataactacaaactgccagatgactttaccgggtgcgtgatcgcctggaatagcaacaatctggacagcaaagtggggggcaattacaactatctgtacagactgtttcgcaagtctaacctgaaaccattcgagagggacattagcacagagatctatcaggccggatccacaccatgtaacggcgtggaaggctttaattgttactttcccctgcagtcctatgggtttcagccaacaaatggggtggggtatcagccctacagggtggtggtgctgtcctttgaactgctgcatgcccctgccaccgtgtgcgggcctaagaaatctaccaacctggtgaagaataaatgcgtgaatttcaatttcaatgggctgacagggacaggcgtgctgaccgaatccaataagaaatttctgccattccagcagtttgggagggacatcgccgacacaaccgacgccgtgagggatccacagaccctggaaatcctggatattacaccctgtagcttcggcggggtgtccgtgattacaccagggacaaatacatccaaccaggtggccgtgctgtatcaggacgtgaattgtaccgaagtgcccgtggccatccatgccgaccagctgacacctacctggagggtgtatagcaccggcagcaacgtgttccagacaagagccgggtgcctgattggcgccgagcacgtgaacaatagctatgaatgcgatatcccaatcggcgccgggatctgcgcctcctaccagacccagacaaattcccccggatctgccagctctgtggcctcccagtctattatcgcctataccatgtctctgggcgccgagaacagcgtggcctattctaacaattctattgccattcccacaaatttcacaattagcgtgaccacagaaatcctgcccgtgtctatgacaaagacctccgtggattgtacaatgtatatttgtggcgacagcacagagtgcagcaacctgctgctgcagtacggctctttctgcacacagctgaaccgcgccctgacaggtattgccgtggagcaggataaaaacacacaggaagtgtttgcccaggtgaagcagatttacaaaacaccacccattaaagacttcggcggattcaacttctcccagatcctgcctgaccccagcaaaccttccaagagaagctttatcgaggacctgctgtttaacaaagtgaccctggccgatgccggatttatcaaacagtacggggactgcctgggcgatattgccgccagagatctgatctgtgcccagaaattcaatgggctgaccgtgctgcctcccctgctgaccgacgagatgatcgcccagtacaccagcgccctgctggccggcacaatcacctctggctggaccttcggcgccggcgccgccctgcagatcccatttgccatgcagatggcctacagatttaatgggatcggggtgacacagaacgtgctgtatgagaatcagaagctgattgccaatcagttcaacagcgccatcgggaagattcaggacagcctgtctagcacagcctctgccctgggcaagctgcaggatgtggtgaaccagaacgcccaggccctgaataccctggtgaaacagctgtctagcaatttcggggccattagctccgtgctgaatgatatcctgagccgcctggatccacctgaggccgaagtgcagatcgacaggctgatcaccggccggctgcagagcctgcagacctatgtgacccagcagctgattagagccgccgagatccgggcctccgccaacctggccgccaccaagatgtctgaatgcgtgctgggccagtctaaacgtgtggatttttgtgggaaggggtaccatctgatgagctttccccagagcgccccccacggggtggtgttcctgcacgtgacatacgtgcctgcccaggaaaaaaattttacaaccgcccctgccatctgccacgacggaaaggcccattttccaagagagggcgtgttcgtgtctaacgggacccattggtttgtgacccagcggaacttttacgagccccagatcattaccacagataacacctttgtgagcggaaattgtgatgtggtgattggcattgtgaacaataccgtgtacgatccactgcagcctgagctggactctttcaaggaggaactggacaagtatttcaaaaatcacacatcccctgacgtggatctgggagacattagcgggattaacgcctctgtggtgaatatccagaaggagatcgaccggctgaacgaggtggccaagaatctgaatgagagcctgatcgacctgcaggaactgggaaaatacgagcagtatatcaaatggccttggtacatctggctgggcttcatcgccgggctgatcgccatcgtgatggtgacaatcatgctgtgttgcatgacctcctgctgtagctgcctgaagggctgctgttcctgcggatcttgttgcaaatttgatgaagacgattctgagcccgtgctgaaaggcgtgaaactgcactatacatagccgccgctccagctttgcacgtttcgatcccaaaggccctttttagggccgacca

SEQ ID NO: 73 - RNA, 3913 nt, synthetic construct
  source 1..3913: mol_type = other RNA
agaagctgtctatcgggctccagcggtcatgtttgtgttcctggtgctgctgccactggtgagctctcagtgcgtgaatctgaccacacggacccagctgcccccagcctacaccaactcttttacaaggggagtgtattaccctgacaaggtgtttagatccagcgtgctgcacagcacccaggacctgttcctgccattcttttccaatgtgacatggttccacgccatccacgtgtctggaaccaatggaaccaagagattcgacaaccccgtgctgccctttaatgatggcgtgtacttcgccagcaccgagaaaagcaatatcattcgcgggtggattttcggaaccacactggactctaagacccagagcctgctgattgtgaacaatgccaccaacgtggtgattaaggtgtgtgagtttcagttctgtaatgaccccttcctgggagtgtattaccacaagaacaataaatcctggatggaatccgagttccgcgtgtactcttccgccaacaattgcacatttgagtacgtgtcccagccttttctgatggacctggagggcaagcagggaaattttaagaatctgagagaatttgtgttcaagaacatcgacggctacttcaagatttattctaagcatacacctatcaatctggtgcgcgatctgccacaggggttcagcgccctggaacctctggtggatctgccaattggaatcaatatcacacgcttccagaccctgctggccctgcaccgctcctacctgacacccggcgattctagctctgggtggaccgccggagccgccgcctactatgtgggatacctgcagccccgcaccttcctgctgaagtataatgaaaacggcaccattaccgacgccgtggactgtgccctggacccactgagcgaaaccaagtgcacactgaaatccttcaccgtggaaaaagggatctaccagaccagcaacttccgcgtgcagcctaccgaaagcattgtgcgctttcccaatattacaaacctgtgtccatttggcgaggtgttcaacgccacacgcttcgccagcgtgtatgcctggaaccggaaaagaatcagcaactgtgtggccgattacagcgtgctgtacaatagcgcctctttttccacatttaaatgttacggggtgtcccctacaaagctgaatgacctgtgtttcaccaatgtgtatgccgacagcttcgtgattagaggcgacgaggtgcggcagatcgccccaggacagacaggcaaaattgccgattataactacaaactgccagatgactttaccgggtgcgtgatcgcctggaatagcaacaatctggacagcaaagtggggggcaattacaactatctgtacagactgtttcgcaagtctaacctgaaaccattcgagagggacattagcacagagatctatcaggccggatccacaccatgtaacggcgtggaaggctttaattgttactttcccctgcagtcctatgggtttcagccaacaaatggggtggggtatcagccctacagggtggtggtgctgtcctttgaactgctgcatgcccctgccaccgtgtgcgggcctaagaaatctaccaacctggtgaagaataaatgcgtgaatttcaatttcaatgggctgacagggacaggcgtgctgaccgaatccaataagaaatttctgccattccagcagtttgggagggacatcgccgacacaaccgacgccgtgagggatccacagaccctggaaatcctggatattacaccctgtagcttcggcggggtgtccgtgattacaccagggacaaatacatccaaccaggtggccgtgctgtatcaggacgtgaattgtaccgaagtgcccgtggccatccatgccgaccagctgacacctacctggagggtgtatagcaccggcagcaacgtgttccagacaagagccgggtgcctgattggcgccgagcacgtgaacaatagctatgaatgcgatatcccaatcggcgccgggatctgcgcctcctaccagacccagacaaattcccccggatctgccagctctgtggcctcccagtctattatcgcctataccatgtctctgggcgccgagaacagcgtggcctattctaacaattctattgccattcccacaaatttcacaattagcgtgaccacagaaatcctgcccgtgtctatgacaaagacctccgtggattgtacaatgtatatttgtggcgacagcacagagtgcagcaacctgctgctgcagtacggctctttctgcacacagctgaaccgcgccctgacaggtattgccgtggagcaggataaaaacacacaggaagtgtttgcccaggtgaagcagatttacaaaacaccacccattaaagacttcggcggattcaacttctcccagatcctgcctgaccccagcaaaccttccaagagaagctttatcgaggacctgctgtttaacaaagtgaccctggccgatgccggatttatcaaacagtacggggactgcctgggcgatattgccgccagagatctgatctgtgcccagaaattcaatgggctgaccgtgctgcctcccctgctgaccgacgagatgatcgcccagtacaccagcgccctgctggccggcacaatcacctctggctggaccttcggcgccggcgccgccctgcagatcccatttgccatgcagatggcctacagatttaatgggatcggggtgacacagaacgtgctgtatgagaatcagaagctgattgccaatcagttcaacagcgccatcgggaagattcaggacagcctgtctagcacagcctctgccctgggcaagctgcaggatgtggtgaaccagaacgcccaggccctgaataccctggtgaaacagctgtctagcaatttcggggccattagctccgtgctgaatgatatcctgagccgcctggatccacctgaggccgaagtgcagatcgacaggctgatcaccggccggctgcagagcctgcagacctatgtgacccagcagctgattagagccgccgagatccgggcctccgccaacctggccgccaccaagatgtctgaatgcgtgctgggccagtctaaacgtgtggatttttgtgggaaggggtaccatctgatgagctttccccagagcgccccccacggggtggtgttcctgcacgtgacatacgtgcctgcccaggaaaaaaattttacaaccgcccctgccatctgccacgacggaaaggcccattttccaagagagggcgtgttcgtgtctaacgggacccattggtttgtgacccagcggaacttttacgagccccagatcattaccacagataacacctttgtgagcggaaattgtgatgtggtgattggcattgtgaacaataccgtgtacgatccactgcagcctgagctggactctttcaaggaggaactggacaagtatttcaaaaatcacacatcccctgacgtggatctgggagacattagcgggattaacgcctctgtggtgaatatccagaaggagatcgaccggctgaacgaggtggccaagaatctgaatgagagcctgatcgacctgcaggaactgggaaaatacgagcagtatatcaaatggccttggtacatctggctgggcttcatcgccgggctgatcgccatcgtgatggtgacaatcatgctgtgttgcatgacctcctgctgtagctgcctgaagggctgctgttcctgcggatcttgttgcaaatttgatgaagacgattctgagcccgtgctgaaaggcgtgaaactgcactatacatagccgccgctccagctttgcacgtttcgatcccaaaggccctttttagggccgaccattcattgc

SEQ ID NO: 74 - RNA, 4040 nt, synthetic construct
  source 1..4040: mol_type = other RNA
aggagaagctgtctatcgggctccagcggtcatgtttgtgttcctggtgctgctgccactggtgagctctcagtgcgtgaatctgaccacacggacccagctgcccccagcctacaccaactcttttacaaggggagtgtattaccctgacaaggtgtttagatccagcgtgctgcacagcacccaggacctgttcctgccattcttttccaatgtgacatggttccacgccatccacgtgtctggaaccaatggaaccaagagattcgacaaccccgtgctgccctttaatgatggcgtgtacttcgccagcaccgagaaaagcaatatcattcgcgggtggattttcggaaccacactggactctaagacccagagcctgctgattgtgaacaatgccaccaacgtggtgattaaggtgtgtgagtttcagttctgtaatgaccccttcctgggagtgtattaccacaagaacaataaatcctggatggaatccgagttccgcgtgtactcttccgccaacaattgcacatttgagtacgtgtcccagccttttctgatggacctggagggcaagcagggaaattttaagaatctgagagaatttgtgttcaagaacatcgacggctacttcaagatttattctaagcatacacctatcaatctggtgcgcgatctgccacaggggttcagcgccctggaacctctggtggatctgccaattggaatcaatatcacacgcttccagaccctgctggccctgcaccgctcctacctgacacccggcgattctagctctgggtggaccgccggagccgccgcctactatgtgggatacctgcagccccgcaccttcctgctgaagtataatgaaaacggcaccattaccgacgccgtggactgtgccctggacccactgagcgaaaccaagtgcacactgaaatccttcaccgtggaaaaagggatctaccagaccagcaacttccgcgtgcagcctaccgaaagcattgtgcgctttcccaatattacaaacctgtgtccatttggcgaggtgttcaacgccacacgcttcgccagcgtgtatgcctggaaccggaaaagaatcagcaactgtgtggccgattacagcgtgctgtacaatagcgcctctttttccacatttaaatgttacggggtgtcccctacaaagctgaatgacctgtgtttcaccaatgtgtatgccgacagcttcgtgattagaggcgacgaggtgcggcagatcgccccaggacagacaggcaaaattgccgattataactacaaactgccagatgactttaccgggtgcgtgatcgcctggaatagcaacaatctggacagcaaagtggggggcaattacaactatctgtacagactgtttcgcaagtctaacctgaaaccattcgagagggacattagcacagagatctatcaggccggatccacaccatgtaacggcgtggaaggctttaattgttactttcccctgcagtcctatgggtttcagccaacaaatggggtggggtatcagccctacagggtggtggtgctgtcctttgaactgctgcatgcccctgccaccgtgtgcgggcctaagaaatctaccaacctggtgaagaataaatgcgtgaatttcaatttcaatgggctgacagggacaggcgtgctgaccgaatccaataagaaatttctgccattccagcagtttgggagggacatcgccgacacaaccgacgccgtgagggatccacagaccctggaaatcctggatattacaccctgtagcttcggcggggtgtccgtgattacaccagggacaaatacatccaaccaggtggccgtgctgtatcaggacgtgaattgtaccgaagtgcccgtggccatccatgccgaccagctgacacctacctggagggtgtatagcaccggcagcaacgtgttccagacaagagccgggtgcctgattggcgccgagcacgtgaacaatagctatgaatgcgatatcccaatcggcgccgggatctgcgcctcctaccagacccagacaaattcccccggatctgccagctctgtggcctcccagtctattatcgcctataccatgtctctgggcgccgagaacagcgtggcctattctaacaattctattgccattcccacaaatttcacaattagcgtgaccacagaaatcctgcccgtgtctatgacaaagacctccgtggattgtacaatgtatatttgtggcgacagcacagagtgcagcaacctgctgctgcagtacggctctttctgcacacagctgaaccgcgccctgacaggtattgccgtggagcaggataaaaacacacaggaagtgtttgcccaggtgaagcagatttacaaaacaccacccattaaagacttcggcggattcaacttctcccagatcctgcctgaccccagcaaaccttccaagagaagctttatcgaggacctgctgtttaacaaagtgaccctggccgatgccggatttatcaaacagtacggggactgcctgggcgatattgccgccagagatctgatctgtgcccagaaattcaatgggctgaccgtgctgcctcccctgctgaccgacgagatgatcgcccagtacaccagcgccctgctggccggcacaatcacctctggctggaccttcggcgccggcgccgccctgcagatcccatttgccatgcagatggcctacagatttaatgggatcggggtgacacagaacgtgctgtatgagaatcagaagctgattgccaatcagttcaacagcgccatcgggaagattcaggacagcctgtctagcacagcctctgccctgggcaagctgcaggatgtggtgaaccagaacgcccaggccctgaataccctggtgaaacagctgtctagcaatttcggggccattagctccgtgctgaatgatatcctgagccgcctggatccacctgaggccgaagtgcagatcgacaggctgatcaccggccggctgcagagcctgcagacctatgtgacccagcagctgattagagccgccgagatccgggcctccgccaacctggccgccaccaagatgtctgaatgcgtgctgggccagtctaaacgtgtggatttttgtgggaaggggtaccatctgatgagctttccccagagcgccccccacggggtggtgttcctgcacgtgacatacgtgcctgcccaggaaaaaaattttacaaccgcccctgccatctgccacgacggaaaggcccattttccaagagagggcgtgttcgtgtctaacgggacccattggtttgtgacccagcggaacttttacgagccccagatcattaccacagataacacctttgtgagcggaaattgtgatgtggtgattggcattgtgaacaataccgtgtacgatccactgcagcctgagctggactctttcaaggaggaactggacaagtatttcaaaaatcacacatcccctgacgtggatctgggagacattagcgggattaacgcctctgtggtgaatatccagaaggagatcgaccggctgaacgaggtggccaagaatctgaatgagagcctgatcgacctgcaggaactgggaaaatacgagcagtatatcaaatggccttggtacatctggctgggcttcatcgccgggctgatcgccatcgtgatggtgacaatcatgctgtgttgcatgacctcctgctgtagctgcctgaagggctgctgttcctgcggatcttgttgcaaatttgatgaagacgattctgagcccgtgctgaaaggcgtgaaactgcactatacatagccgccgctccagctttgcacgtttcgatcccaaaggccctttttagggccgaccattcattgcaaaaaaaaaaaaaaaaaaaaaaaaaaaaaagcatatgactaaaaaaaaaaaaaaaaaaaaaaaaaaaaaaaaaaaaaaaaaaaaaaaaaaaaaaaaaaaaaaaaaaaaaaaaaaaaaaaaaaaa

SEQ ID NO: 75 - RNA, 4076 nt, synthetic construct
  source 1..4076: mol_type = other RNA
gttccctatcactctctttaatcactactcacagtaacctcaactcctgccacaatgtttgtgttcctggtgctgctgccactggtgagctctcagtgcgtgaatctgaccacacggacccagctgcccccagcctacaccaactcttttacaaggggagtgtattaccctgacaaggtgtttagatccagcgtgctgcacagcacccaggacctgttcctgccattcttttccaatgtgacatggttccacgccatccacgtgtctggaaccaatggaaccaagagattcgacaaccccgtgctgccctttaatgatggcgtgtacttcgccagcaccgagaaaagcaatatcattcgcgggtggattttcggaaccacactggactctaagacccagagcctgctgattgtgaacaatgccaccaacgtggtgattaaggtgtgtgagtttcagttctgtaatgaccccttcctgggagtgtattaccacaagaacaataaatcctggatggaatccgagttccgcgtgtactcttccgccaacaattgcacatttgagtacgtgtcccagccttttctgatggacctggagggcaagcagggaaattttaagaatctgagagaatttgtgttcaagaacatcgacggctacttcaagatttattctaagcatacacctatcaatctggtgcgcgatctgccacaggggttcagcgccctggaacctctggtggatctgccaattggaatcaatatcacacgcttccagaccctgctggccctgcaccgctcctacctgacacccggcgattctagctctgggtggaccgccggagccgccgcctactatgtgggatacctgcagccccgcaccttcctgctgaagtataatgaaaacggcaccattaccgacgccgtggactgtgccctggacccactgagcgaaaccaagtgcacactgaaatccttcaccgtggaaaaagggatctaccagaccagcaacttccgcgtgcagcctaccgaaagcattgtgcgctttcccaatattacaaacctgtgtccatttggcgaggtgttcaacgccacacgcttcgccagcgtgtatgcctggaaccggaaaagaatcagcaactgtgtggccgattacagcgtgctgtacaatagcgcctctttttccacatttaaatgttacggggtgtcccctacaaagctgaatgacctgtgtttcaccaatgtgtatgccgacagcttcgtgattagaggcgacgaggtgcggcagatcgccccaggacagacaggcaaaattgccgattataactacaaactgccagatgactttaccgggtgcgtgatcgcctggaatagcaacaatctggacagcaaagtggggggcaattacaactatctgtacagactgtttcgcaagtctaacctgaaaccattcgagagggacattagcacagagatctatcaggccggatccacaccatgtaacggcgtggaaggctttaattgttactttcccctgcagtcctatgggtttcagccaacaaatggggtggggtatcagccctacagggtggtggtgctgtcctttgaactgctgcatgcccctgccaccgtgtgcgggcctaagaaatctaccaacctggtgaagaataaatgcgtgaatttcaatttcaatgggctgacagggacaggcgtgctgaccgaatccaataagaaatttctgccattccagcagtttgggagggacatcgccgacacaaccgacgccgtgagggatccacagaccctggaaatcctggatattacaccctgtagcttcggcggggtgtccgtgattacaccagggacaaatacatccaaccaggtggccgtgctgtatcaggacgtgaattgtaccgaagtgcccgtggccatccatgccgaccagctgacacctacctggagggtgtatagcaccggcagcaacgtgttccagacaagagccgggtgcctgattggcgccgagcacgtgaacaatagctatgaatgcgatatcccaatcggcgccgggatctgcgcctcctaccagacccagacaaattcccccggatctgccagctctgtggcctcccagtctattatcgcctataccatgtctctgggcgccgagaacagcgtggcctattctaacaattctattgccattcccacaaatttcacaattagcgtgaccacagaaatcctgcccgtgtctatgacaaagacctccgtggattgtacaatgtatatttgtggcgacagcacagagtgcagcaacctgctgctgcagtacggctctttctgcacacagctgaaccgcgccctgacaggtattgccgtggagcaggataaaaacacacaggaagtgtttgcccaggtgaagcagatttacaaaacaccacccattaaagacttcggcggattcaacttctcccagatcctgcctgaccccagcaaaccttccaagagaagctttatcgaggacctgctgtttaacaaagtgaccctggccgatgccggatttatcaaacagtacggggactgcctgggcgatattgccgccagagatctgatctgtgcccagaaattcaatgggctgaccgtgctgcctcccctgctgaccgacgagatgatcgcccagtacaccagcgccctgctggccggcacaatcacctctggctggaccttcggcgccggcgccgccctgcagatcccatttgccatgcagatggcctacagatttaatgggatcggggtgacacagaacgtgctgtatgagaatcagaagctgattgccaatcagttcaacagcgccatcgggaagattcaggacagcctgtctagcacagcctctgccctgggcaagctgcaggatgtggtgaaccagaacgcccaggccctgaataccctggtgaaacagctgtctagcaatttcggggccattagctccgtgctgaatgatatcctgagccgcctggatccacctgaggccgaagtgcagatcgacaggctgatcaccggccggctgcagagcctgcagacctatgtgacccagcagctgattagagccgccgagatccgggcctccgccaacctggccgccaccaagatgtctgaatgcgtgctgggccagtctaaacgtgtggatttttgtgggaaggggtaccatctgatgagctttccccagagcgccccccacggggtggtgttcctgcacgtgacatacgtgcctgcccaggaaaaaaattttacaaccgcccctgccatctgccacgacggaaaggcccattttccaagagagggcgtgttcgtgtctaacgggacccattggtttgtgacccagcggaacttttacgagccccagatcattaccacagataacacctttgtgagcggaaattgtgatgtggtgattggcattgtgaacaataccgtgtacgatccactgcagcctgagctggactctttcaaggaggaactggacaagtatttcaaaaatcacacatcccctgacgtggatctgggagacattagcgggattaacgcctctgtggtgaatatccagaaggagatcgaccggctgaacgaggtggccaagaatctgaatgagagcctgatcgacctgcaggaactgggaaaatacgagcagtatatcaaatggccttggtacatctggctgggcttcatcgccgggctgatcgccatcgtgatggtgacaatcatgctgtgttgcatgacctcctgctgtagctgcctgaagggctgctgttcctgcggatcttgttgcaaatttgatgaagacgattctgagcccgtgctgaaaggcgtgaaactgcactatacatagtaattaagtgcttcccacttaaaacatatcaggccttctatttatttaaatatttaaattttatatttattgttgaatgtatggtttgctacctattgtaactattattcttaatcttaaaactataaatatggatcttttatgattctttttgtaagccctaggggctctaaaatggtttcacttatttatcccaaaat

SEQ ID NO: 76 - RNA, 4084 nt, synthetic construct
  source 1..4084: mol_type = other RNA
gttccctatcactctctttaatcactactcacagtaacctcaactcctgccacaatgtttgtgttcctggtgctgctgccactggtgagctctcagtgcgtgaatctgaccacacggacccagctgcccccagcctacaccaactcttttacaaggggagtgtattaccctgacaaggtgtttagatccagcgtgctgcacagcacccaggacctgttcctgccattcttttccaatgtgacatggttccacgccatccacgtgtctggaaccaatggaaccaagagattcgacaaccccgtgctgccctttaatgatggcgtgtacttcgccagcaccgagaaaagcaatatcattcgcgggtggattttcggaaccacactggactctaagacccagagcctgctgattgtgaacaatgccaccaacgtggtgattaaggtgtgtgagtttcagttctgtaatgaccccttcctgggagtgtattaccacaagaacaataaatcctggatggaatccgagttccgcgtgtactcttccgccaacaattgcacatttgagtacgtgtcccagccttttctgatggacctggagggcaagcagggaaattttaagaatctgagagaatttgtgttcaagaacatcgacggctacttcaagatttattctaagcatacacctatcaatctggtgcgcgatctgccacaggggttcagcgccctggaacctctggtggatctgccaattggaatcaatatcacacgcttccagaccctgctggccctgcaccgctcctacctgacacccggcgattctagctctgggtggaccgccggagccgccgcctactatgtgggatacctgcagccccgcaccttcctgctgaagtataatgaaaacggcaccattaccgacgccgtggactgtgccctggacccactgagcgaaaccaagtgcacactgaaatccttcaccgtggaaaaagggatctaccagaccagcaacttccgcgtgcagcctaccgaaagcattgtgcgctttcccaatattacaaacctgtgtccatttggcgaggtgttcaacgccacacgcttcgccagcgtgtatgcctggaaccggaaaagaatcagcaactgtgtggccgattacagcgtgctgtacaatagcgcctctttttccacatttaaatgttacggggtgtcccctacaaagctgaatgacctgtgtttcaccaatgtgtatgccgacagcttcgtgattagaggcgacgaggtgcggcagatcgccccaggacagacaggcaaaattgccgattataactacaaactgccagatgactttaccgggtgcgtgatcgcctggaatagcaacaatctggacagcaaagtggggggcaattacaactatctgtacagactgtttcgcaagtctaacctgaaaccattcgagagggacattagcacagagatctatcaggccggatccacaccatgtaacggcgtggaaggctttaattgttactttcccctgcagtcctatgggtttcagccaacaaatggggtggggtatcagccctacagggtggtggtgctgtcctttgaactgctgcatgcccctgccaccgtgtgcgggcctaagaaatctaccaacctggtgaagaataaatgcgtgaatttcaatttcaatgggctgacagggacaggcgtgctgaccgaatccaataagaaatttctgccattccagcagtttgggagggacatcgccgacacaaccgacgccgtgagggatccacagaccctggaaatcctggatattacaccctgtagcttcggcggggtgtccgtgattacaccagggacaaatacatccaaccaggtggccgtgctgtatcaggacgtgaattgtaccgaagtgcccgtggccatccatgccgaccagctgacacctacctggagggtgtatagcaccggcagcaacgtgttccagacaagagccgggtgcctgattggcgccgagcacgtgaacaatagctatgaatgcgatatcccaatcggcgccgggatctgcgcctcctaccagacccagacaaattcccccggatctgccagctctgtggcctcccagtctattatcgcctataccatgtctctgggcgccgagaacagcgtggcctattctaacaattctattgccattcccacaaatttcacaattagcgtgaccacagaaatcctgcccgtgtctatgacaaagacctccgtggattgtacaatgtatatttgtggcgacagcacagagtgcagcaacctgctgctgcagtacggctctttctgcacacagctgaaccgcgccctgacaggtattgccgtggagcaggataaaaacacacaggaagtgtttgcccaggtgaagcagatttacaaaacaccacccattaaagacttcggcggattcaacttctcccagatcctgcctgaccccagcaaaccttccaagagaagctttatcgaggacctgctgtttaacaaagtgaccctggccgatgccggatttatcaaacagtacggggactgcctgggcgatattgccgccagagatctgatctgtgcccagaaattcaatgggctgaccgtgctgcctcccctgctgaccgacgagatgatcgcccagtacaccagcgccctgctggccggcacaatcacctctggctggaccttcggcgccggcgccgccctgcagatcccatttgccatgcagatggcctacagatttaatgggatcggggtgacacagaacgtgctgtatgagaatcagaagctgattgccaatcagttcaacagcgccatcgggaagattcaggacagcctgtctagcacagcctctgccctgggcaagctgcaggatgtggtgaaccagaacgcccaggccctgaataccctggtgaaacagctgtctagcaatttcggggccattagctccgtgctgaatgatatcctgagccgcctggatccacctgaggccgaagtgcagatcgacaggctgatcaccggccggctgcagagcctgcagacctatgtgacccagcagctgattagagccgccgagatccgggcctccgccaacctggccgccaccaagatgtctgaatgcgtgctgggccagtctaaacgtgtggatttttgtgggaaggggtaccatctgatgagctttccccagagcgccccccacggggtggtgttcctgcacgtgacatacgtgcctgcccaggaaaaaaattttacaaccgcccctgccatctgccacgacggaaaggcccattttccaagagagggcgtgttcgtgtctaacgggacccattggtttgtgacccagcggaacttttacgagccccagatcattaccacagataacacctttgtgagcggaaattgtgatgtggtgattggcattgtgaacaataccgtgtacgatccactgcagcctgagctggactctttcaaggaggaactggacaagtatttcaaaaatcacacatcccctgacgtggatctgggagacattagcgggattaacgcctctgtggtgaatatccagaaggagatcgaccggctgaacgaggtggccaagaatctgaatgagagcctgatcgacctgcaggaactgggaaaatacgagcagtatatcaaatggccttggtacatctggctgggcttcatcgccgggctgatcgccatcgtgatggtgacaatcatgctgtgttgcatgacctcctgctgtagctgcctgaagggctgctgttcctgcggatcttgttgcaaatttgatgaagacgattctgagcccgtgctgaaaggcgtgaaactgcactatacatagtaattaagtgcttcccacttaaaacatatcaggccttctatttatttaaatatttaaattttatatttattgttgaatgtatggtttgctacctattgtaactattattcttaatcttaaaactataaatatggatcttttatgattctttttgtaagccctaggggctctaaaatggtttcacttatttatcccaaaatttcattgc

SEQ ID NO: 77 - RNA, 4212 nt, synthetic construct
  source 1..4212: mol_type = other RNA
aggagttccctatcactctctttaatcactactcacagtaacctcaactcctgccacaatgtttgtgttcctggtgctgctgccactggtgagctctcagtgcgtgaatctgaccacacggacccagctgcccccagcctacaccaactcttttacaaggggagtgtattaccctgacaaggtgtttagatccagcgtgctgcacagcacccaggacctgttcctgccattcttttccaatgtgacatggttccacgccatccacgtgtctggaaccaatggaaccaagagattcgacaaccccgtgctgccctttaatgatggcgtgtacttcgccagcaccgagaaaagcaatatcattcgcgggtggattttcggaaccacactggactctaagacccagagcctgctgattgtgaacaatgccaccaacgtggtgattaaggtgtgtgagtttcagttctgtaatgaccccttcctgggagtgtattaccacaagaacaataaatcctggatggaatccgagttccgcgtgtactcttccgccaacaattgcacatttgagtacgtgtcccagccttttctgatggacctggagggcaagcagggaaattttaagaatctgagagaatttgtgttcaagaacatcgacggctacttcaagatttattctaagcatacacctatcaatctggtgcgcgatctgccacaggggttcagcgccctggaacctctggtggatctgccaattggaatcaatatcacacgcttccagaccctgctggccctgcaccgctcctacctgacacccggcgattctagctctgggtggaccgccggagccgccgcctactatgtgggatacctgcagccccgcaccttcctgctgaagtataatgaaaacggcaccattaccgacgccgtggactgtgccctggacccactgagcgaaaccaagtgcacactgaaatccttcaccgtggaaaaagggatctaccagaccagcaacttccgcgtgcagcctaccgaaagcattgtgcgctttcccaatattacaaacctgtgtccatttggcgaggtgttcaacgccacacgcttcgccagcgtgtatgcctggaaccggaaaagaatcagcaactgtgtggccgattacagcgtgctgtacaatagcgcctctttttccacatttaaatgttacggggtgtcccctacaaagctgaatgacctgtgtttcaccaatgtgtatgccgacagcttcgtgattagaggcgacgaggtgcggcagatcgccccaggacagacaggcaaaattgccgattataactacaaactgccagatgactttaccgggtgcgtgatcgcctggaatagcaacaatctggacagcaaagtggggggcaattacaactatctgtacagactgtttcgcaagtctaacctgaaaccattcgagagggacattagcacagagatctatcaggccggatccacaccatgtaacggcgtggaaggctttaattgttactttcccctgcagtcctatgggtttcagccaacaaatggggtggggtatcagccctacagggtggtggtgctgtcctttgaactgctgcatgcccctgccaccgtgtgcgggcctaagaaatctaccaacctggtgaagaataaatgcgtgaatttcaatttcaatgggctgacagggacaggcgtgctgaccgaatccaataagaaatttctgccattccagcagtttgggagggacatcgccgacacaaccgacgccgtgagggatccacagaccctggaaatcctggatattacaccctgtagcttcggcggggtgtccgtgattacaccagggacaaatacatccaaccaggtggccgtgctgtatcaggacgtgaattgtaccgaagtgcccgtggccatccatgccgaccagctgacacctacctggagggtgtatagcaccggcagcaacgtgttccagacaagagccgggtgcctgattggcgccgagcacgtgaacaatagctatgaatgcgatatcccaatcggcgccgggatctgcgcctcctaccagacccagacaaattcccccggatctgccagctctgtggcctcccagtctattatcgcctataccatgtctctgggcgccgagaacagcgtggcctattctaacaattctattgccattcccacaaatttcacaattagcgtgaccacagaaatcctgcccgtgtctatgacaaagacctccgtggattgtacaatgtatatttgtggcgacagcacagagtgcagcaacctgctgctgcagtacggctctttctgcacacagctgaaccgcgccctgacaggtattgccgtggagcaggataaaaacacacaggaagtgtttgcccaggtgaagcagatttacaaaacaccacccattaaagacttcggcggattcaacttctcccagatcctgcctgaccccagcaaaccttccaagagaagctttatcgaggacctgctgtttaacaaagtgaccctggccgatgccggatttatcaaacagtacggggactgcctgggcgatattgccgccagagatctgatctgtgcccagaaattcaatgggctgaccgtgctgcctcccctgctgaccgacgagatgatcgcccagtacaccagcgccctgctggccggcacaatcacctctggctggaccttcggcgccggcgccgccctgcagatcccatttgccatgcagatggcctacagatttaatgggatcggggtgacacagaacgtgctgtatgagaatcagaagctgattgccaatcagttcaacagcgccatcgggaagattcaggacagcctgtctagcacagcctctgccctgggcaagctgcaggatgtggtgaaccagaacgcccaggccctgaataccctggtgaaacagctgtctagcaatttcggggccattagctccgtgctgaatgatatcctgagccgcctggatccacctgaggccgaagtgcagatcgacaggctgatcaccggccggctgcagagcctgcagacctatgtgacccagcagctgattagagccgccgagatccgggcctccgccaacctggccgccaccaagatgtctgaatgcgtgctgggccagtctaaacgtgtggatttttgtgggaaggggtaccatctgatgagctttccccagagcgccccccacggggtggtgttcctgcacgtgacatacgtgcctgcccaggaaaaaaattttacaaccgcccctgccatctgccacgacggaaaggcccattttccaagagagggcgtgttcgtgtctaacgggacccattggtttgtgacccagcggaacttttacgagccccagatcattaccacagataacacctttgtgagcggaaattgtgatgtggtgattggcattgtgaacaataccgtgtacgatccactgcagcctgagctggactctttcaaggaggaactggacaagtatttcaaaaatcacacatcccctgacgtggatctgggagacattagcgggattaacgcctctgtggtgaatatccagaaggagatcgaccggctgaacgaggtggccaagaatctgaatgagagcctgatcgacctgcaggaactgggaaaatacgagcagtatatcaaatggccttggtacatctggctgggcttcatcgccgggctgatcgccatcgtgatggtgacaatcatgctgtgttgcatgacctcctgctgtagctgcctgaagggctgctgttcctgcggatcttgttgcaaatttgatgaagacgattctgagcccgtgctgaaaggcgtgaaactgcactatacatagtaattaagtgcttcccacttaaaacatatcaggccttctatttatttaaatatttaaattttatatttattgttgaatgtatggtttgctacctattgtaactattattcttaatcttaaaactataaatatggatcttttatgattctttttgtaagccctaggggctctaaaatggtttcacttatttatcccaaaatttcattgcaaaaaaaaaaaaaaaaaaaaaaaaaaaaaagcatatgactaaaaaaaaaaaaaaaaaaaaaaaaaaaaaaaaaaaaaaaaaaaaaaaaaaaaaaaaaaaaaaaaaaaaaaaaaaaaaaaaaaaa

SEQ ID NO: 78 - RNA, 3979 nt, synthetic construct
  source 1..3979: mol_type = other RNA
gggaaataagagagaaaagaagagtaagaagaaatataagagccaccatgtttgtgttcctggtgctgctgccactggtgagctctcagtgcgtgaatctgaccacacggacccagctgcccccagcctacaccaactcttttacaaggggagtgtattaccctgacaaggtgtttagatccagcgtgctgcacagcacccaggacctgttcctgccattcttttccaatgtgacatggttccacgccatccacgtgtctggaaccaatggaaccaagagattcgacaaccccgtgctgccctttaatgatggcgtgtacttcgccagcaccgagaaaagcaatatcattcgcgggtggattttcggaaccacactggactctaagacccagagcctgctgattgtgaacaatgccaccaacgtggtgattaaggtgtgtgagtttcagttctgtaatgaccccttcctgggagtgtattaccacaagaacaataaatcctggatggaatccgagttccgcgtgtactcttccgccaacaattgcacatttgagtacgtgtcccagccttttctgatggacctggagggcaagcagggaaattttaagaatctgagagaatttgtgttcaagaacatcgacggctacttcaagatttattctaagcatacacctatcaatctggtgcgcgatctgccacaggggttcagcgccctggaacctctggtggatctgccaattggaatcaatatcacacgcttccagaccctgctggccctgcaccgctcctacctgacacccggcgattctagctctgggtggaccgccggagccgccgcctactatgtgggatacctgcagccccgcaccttcctgctgaagtataatgaaaacggcaccattaccgacgccgtggactgtgccctggacccactgagcgaaaccaagtgcacactgaaatccttcaccgtggaaaaagggatctaccagaccagcaacttccgcgtgcagcctaccgaaagcattgtgcgctttcccaatattacaaacctgtgtccatttggcgaggtgttcaacgccacacgcttcgccagcgtgtatgcctggaaccggaaaagaatcagcaactgtgtggccgattacagcgtgctgtacaatagcgcctctttttccacatttaaatgttacggggtgtcccctacaaagctgaatgacctgtgtttcaccaatgtgtatgccgacagcttcgtgattagaggcgacgaggtgcggcagatcgccccaggacagacaggcaaaattgccgattataactacaaactgccagatgactttaccgggtgcgtgatcgcctggaatagcaacaatctggacagcaaagtggggggcaattacaactatctgtacagactgtttcgcaagtctaacctgaaaccattcgagagggacattagcacagagatctatcaggccggatccacaccatgtaacggcgtggaaggctttaattgttactttcccctgcagtcctatgggtttcagccaacaaatggggtggggtatcagccctacagggtggtggtgctgtcctttgaactgctgcatgcccctgccaccgtgtgcgggcctaagaaatctaccaacctggtgaagaataaatgcgtgaatttcaatttcaatgggctgacagggacaggcgtgctgaccgaatccaataagaaatttctgccattccagcagtttgggagggacatcgccgacacaaccgacgccgtgagggatccacagaccctggaaatcctggatattacaccctgtagcttcggcggggtgtccgtgattacaccagggacaaatacatccaaccaggtggccgtgctgtatcaggacgtgaattgtaccgaagtgcccgtggccatccatgccgaccagctgacacctacctggagggtgtatagcaccggcagcaacgtgttccagacaagagccgggtgcctgattggcgccgagcacgtgaacaatagctatgaatgcgatatcccaatcggcgccgggatctgcgcctcctaccagacccagacaaattcccccagacgggccagatctgtggcctcccagtctattatcgcctataccatgtctctgggcgccgagaacagcgtggcctattctaacaattctattgccattcccacaaatttcacaattagcgtgaccacagaaatcctgcccgtgtctatgacaaagacctccgtggattgtacaatgtatatttgtggcgacagcacagagtgcagcaacctgctgctgcagtacggctctttctgcacacagctgaaccgcgccctgacaggtattgccgtggagcaggataaaaacacacaggaagtgtttgcccaggtgaagcagatttacaaaacaccacccattaaagacttcggcggattcaacttctcccagatcctgcctgaccccagcaaaccttccaagagaagctttatcgaggacctgctgtttaacaaagtgaccctggccgatgccggatttatcaaacagtacggggactgcctgggcgatattgccgccagagatctgatctgtgcccagaaattcaatgggctgaccgtgctgcctcccctgctgaccgacgagatgatcgcccagtacaccagcgccctgctggccggcacaatcacctctggctggaccttcggcgccggcgccgccctgcagatcccatttgccatgcagatggcctacagatttaatgggatcggggtgacacagaacgtgctgtatgagaatcagaagctgattgccaatcagttcaacagcgccatcgggaagattcaggacagcctgtctagcacagcctctgccctgggcaagctgcaggatgtggtgaaccagaacgcccaggccctgaataccctggtgaaacagctgtctagcaatttcggggccattagctccgtgctgaatgatatcctgagccgcctggatccacctgaggccgaagtgcagatcgacaggctgatcaccggccggctgcagagcctgcagacctatgtgacccagcagctgattagagccgccgagatccgggcctccgccaacctggccgccaccaagatgtctgaatgcgtgctgggccagtctaaacgtgtggatttttgtgggaaggggtaccatctgatgagctttccccagagcgccccccacggggtggtgttcctgcacgtgacatacgtgcctgcccaggaaaaaaattttacaaccgcccctgccatctgccacgacggaaaggcccattttccaagagagggcgtgttcgtgtctaacgggacccattggtttgtgacccagcggaacttttacgagccccagatcattaccacagataacacctttgtgagcggaaattgtgatgtggtgattggcattgtgaacaataccgtgtacgatccactgcagcctgagctggactctttcaaggaggaactggacaagtatttcaaaaatcacacatcccctgacgtggatctgggagacattagcgggattaacgcctctgtggtgaatatccagaaggagatcgaccggctgaacgaggtggccaagaatctgaatgagagcctgatcgacctgcaggaactgggaaaatacgagcagtatatcaaatggccttggtacatctggctgggcttcatcgccgggctgatcgccatcgtgatggtgacaatcatgctgtgttgcatgacctcctgctgtagctgcctgaagggctgctgttcctgcggatcttgttgcaaatttgatgaagacgattctgagcccgtgctgaaaggcgtgaaactgcactatacataggctggagcctcggtggccaagcttcttgccccttgggcctccccccagcccctcctccccttcctgcacccgtacccccgtggtctttgaataaagtctgagtgggcggc

SEQ ID NO: 79 - RNA, 4112 nt, synthetic construct
  source 1..4112: mol_type = other RNA
agggaaataagagagaaaagaagagtaagaagaaatataagagccaccatgtttgtgttcctggtgctgctgccactggtgagctctcagtgcgtgaatctgaccacacggacccagctgcccccagcctacaccaactcttttacaaggggagtgtattaccctgacaaggtgtttagatccagcgtgctgcacagcacccaggacctgttcctgccattcttttccaatgtgacatggttccacgccatccacgtgtctggaaccaatggaaccaagagattcgacaaccccgtgctgccctttaatgatggcgtgtacttcgccagcaccgagaaaagcaatatcattcgcgggtggattttcggaaccacactggactctaagacccagagcctgctgattgtgaacaatgccaccaacgtggtgattaaggtgtgtgagtttcagttctgtaatgaccccttcctgggagtgtattaccacaagaacaataaatcctggatggaatccgagttccgcgtgtactcttccgccaacaattgcacatttgagtacgtgtcccagccttttctgatggacctggagggcaagcagggaaattttaagaatctgagagaatttgtgttcaagaacatcgacggctacttcaagatttattctaagcatacacctatcaatctggtgcgcgatctgccacaggggttcagcgccctggaacctctggtggatctgccaattggaatcaatatcacacgcttccagaccctgctggccctgcaccgctcctacctgacacccggcgattctagctctgggtggaccgccggagccgccgcctactatgtgggatacctgcagccccgcaccttcctgctgaagtataatgaaaacggcaccattaccgacgccgtggactgtgccctggacccactgagcgaaaccaagtgcacactgaaatccttcaccgtggaaaaagggatctaccagaccagcaacttccgcgtgcagcctaccgaaagcattgtgcgctttcccaatattacaaacctgtgtccatttggcgaggtgttcaacgccacacgcttcgccagcgtgtatgcctggaaccggaaaagaatcagcaactgtgtggccgattacagcgtgctgtacaatagcgcctctttttccacatttaaatgttacggggtgtcccctacaaagctgaatgacctgtgtttcaccaatgtgtatgccgacagcttcgtgattagaggcgacgaggtgcggcagatcgccccaggacagacaggcaaaattgccgattataactacaaactgccagatgactttaccgggtgcgtgatcgcctggaatagcaacaatctggacagcaaagtggggggcaattacaactatctgtacagactgtttcgcaagtctaacctgaaaccattcgagagggacattagcacagagatctatcaggccggatccacaccatgtaacggcgtggaaggctttaattgttactttcccctgcagtcctatgggtttcagccaacaaatggggtggggtatcagccctacagggtggtggtgctgtcctttgaactgctgcatgcccctgccaccgtgtgcgggcctaagaaatctaccaacctggtgaagaataaatgcgtgaatttcaatttcaatgggctgacagggacaggcgtgctgaccgaatccaataagaaatttctgccattccagcagtttgggagggacatcgccgacacaaccgacgccgtgagggatccacagaccctggaaatcctggatattacaccctgtagcttcggcggggtgtccgtgattacaccagggacaaatacatccaaccaggtggccgtgctgtatcaggacgtgaattgtaccgaagtgcccgtggccatccatgccgaccagctgacacctacctggagggtgtatagcaccggcagcaacgtgttccagacaagagccgggtgcctgattggcgccgagcacgtgaacaatagctatgaatgcgatatcccaatcggcgccgggatctgcgcctcctaccagacccagacaaattcccccagacgggccagatctgtggcctcccagtctattatcgcctataccatgtctctgggcgccgagaacagcgtggcctattctaacaattctattgccattcccacaaatttcacaattagcgtgaccacagaaatcctgcccgtgtctatgacaaagacctccgtggattgtacaatgtatatttgtggcgacagcacagagtgcagcaacctgctgctgcagtacggctctttctgcacacagctgaaccgcgccctgacaggtattgccgtggagcaggataaaaacacacaggaagtgtttgcccaggtgaagcagatttacaaaacaccacccattaaagacttcggcggattcaacttctcccagatcctgcctgaccccagcaaaccttccaagagaagctttatcgaggacctgctgtttaacaaagtgaccctggccgatgccggatttatcaaacagtacggggactgcctgggcgatattgccgccagagatctgatctgtgcccagaaattcaatgggctgaccgtgctgcctcccctgctgaccgacgagatgatcgcccagtacaccagcgccctgctggccggcacaatcacctctggctggaccttcggcgccggcgccgccctgcagatcccatttgccatgcagatggcctacagatttaatgggatcggggtgacacagaacgtgctgtatgagaatcagaagctgattgccaatcagttcaacagcgccatcgggaagattcaggacagcctgtctagcacagcctctgccctgggcaagctgcaggatgtggtgaaccagaacgcccaggccctgaataccctggtgaaacagctgtctagcaatttcggggccattagctccgtgctgaatgatatcctgagccgcctggatccacctgaggccgaagtgcagatcgacaggctgatcaccggccggctgcagagcctgcagacctatgtgacccagcagctgattagagccgccgagatccgggcctccgccaacctggccgccaccaagatgtctgaatgcgtgctgggccagtctaaacgtgtggatttttgtgggaaggggtaccatctgatgagctttccccagagcgccccccacggggtggtgttcctgcacgtgacatacgtgcctgcccaggaaaaaaattttacaaccgcccctgccatctgccacgacggaaaggcccattttccaagagagggcgtgttcgtgtctaacgggacccattggtttgtgacccagcggaacttttacgagccccagatcattaccacagataacacctttgtgagcggaaattgtgatgtggtgattggcattgtgaacaataccgtgtacgatccactgcagcctgagctggactctttcaaggaggaactggacaagtatttcaaaaatcacacatcccctgacgtggatctgggagacattagcgggattaacgcctctgtggtgaatatccagaaggagatcgaccggctgaacgaggtggccaagaatctgaatgagagcctgatcgacctgcaggaactgggaaaatacgagcagtatatcaaatggccttggtacatctggctgggcttcatcgccgggctgatcgccatcgtgatggtgacaatcatgctgtgttgcatgacctcctgctgtagctgcctgaagggctgctgttcctgcggatcttgttgcaaatttgatgaagacgattctgagcccgtgctgaaaggcgtgaaactgcactatacataggctggagcctcggtggccaagcttcttgccccttgggcctccccccagcccctcctccccttcctgcacccgtacccccgtggtctttgaataaagtctgagtgggcggcttcattgcaaaaaaaaaaaaaaaaaaaaaaaaaaaaaagcatatgactaaaaaaaaaaaaaaaaaaaaaaaaaaaaaaaaaaaaaaaaaaaaaaaaaaaaaaaaaaaaaaaaaaaaaaaaaaaaaaaaaaaa

SEQ ID NO: 80 - RNA, 4174 nt, synthetic construct
  source 1..4174: mol_type = other RNA
gagaataaactagtattcttctggtccccacagactcagagagaacccgccaccatgtttgtgttcctggtgctgctgccactggtgagctctcagtgcgtgaatctgaccacacggacccagctgcccccagcctacaccaactcttttacaaggggagtgtattaccctgacaaggtgtttagatccagcgtgctgcacagcacccaggacctgttcctgccattcttttccaatgtgacatggttccacgccatccacgtgtctggaaccaatggaaccaagagattcgacaaccccgtgctgccctttaatgatggcgtgtacttcgccagcaccgagaaaagcaatatcattcgcgggtggattttcggaaccacactggactctaagacccagagcctgctgattgtgaacaatgccaccaacgtggtgattaaggtgtgtgagtttcagttctgtaatgaccccttcctgggagtgtattaccacaagaacaataaatcctggatggaatccgagttccgcgtgtactcttccgccaacaattgcacatttgagtacgtgtcccagccttttctgatggacctggagggcaagcagggaaattttaagaatctgagagaatttgtgttcaagaacatcgacggctacttcaagatttattctaagcatacacctatcaatctggtgcgcgatctgccacaggggttcagcgccctggaacctctggtggatctgccaattggaatcaatatcacacgcttccagaccctgctggccctgcaccgctcctacctgacacccggcgattctagctctgggtggaccgccggagccgccgcctactatgtgggatacctgcagccccgcaccttcctgctgaagtataatgaaaacggcaccattaccgacgccgtggactgtgccctggacccactgagcgaaaccaagtgcacactgaaatccttcaccgtggaaaaagggatctaccagaccagcaacttccgcgtgcagcctaccgaaagcattgtgcgctttcccaatattacaaacctgtgtccatttggcgaggtgttcaacgccacacgcttcgccagcgtgtatgcctggaaccggaaaagaatcagcaactgtgtggccgattacagcgtgctgtacaatagcgcctctttttccacatttaaatgttacggggtgtcccctacaaagctgaatgacctgtgtttcaccaatgtgtatgccgacagcttcgtgattagaggcgacgaggtgcggcagatcgccccaggacagacaggcaaaattgccgattataactacaaactgccagatgactttaccgggtgcgtgatcgcctggaatagcaacaatctggacagcaaagtggggggcaattacaactatctgtacagactgtttcgcaagtctaacctgaaaccattcgagagggacattagcacagagatctatcaggccggatccacaccatgtaacggcgtggaaggctttaattgttactttcccctgcagtcctatgggtttcagccaacaaatggggtggggtatcagccctacagggtggtggtgctgtcctttgaactgctgcatgcccctgccaccgtgtgcgggcctaagaaatctaccaacctggtgaagaataaatgcgtgaatttcaatttcaatgggctgacagggacaggcgtgctgaccgaatccaataagaaatttctgccattccagcagtttgggagggacatcgccgacacaaccgacgccgtgagggatccacagaccctggaaatcctggatattacaccctgtagcttcggcggggtgtccgtgattacaccagggacaaatacatccaaccaggtggccgtgctgtatcaggacgtgaattgtaccgaagtgcccgtggccatccatgccgaccagctgacacctacctggagggtgtatagcaccggcagcaacgtgttccagacaagagccgggtgcctgattggcgccgagcacgtgaacaatagctatgaatgcgatatcccaatcggcgccgggatctgcgcctcctaccagacccagacaaattcccccagacgggccagatctgtggcctcccagtctattatcgcctataccatgtctctgggcgccgagaacagcgtggcctattctaacaattctattgccattcccacaaatttcacaattagcgtgaccacagaaatcctgcccgtgtctatgacaaagacctccgtggattgtacaatgtatatttgtggcgacagcacagagtgcagcaacctgctgctgcagtacggctctttctgcacacagctgaaccgcgccctgacaggtattgccgtggagcaggataaaaacacacaggaagtgtttgcccaggtgaagcagatttacaaaacaccacccattaaagacttcggcggattcaacttctcccagatcctgcctgaccccagcaaaccttccaagagaagctttatcgaggacctgctgtttaacaaagtgaccctggccgatgccggatttatcaaacagtacggggactgcctgggcgatattgccgccagagatctgatctgtgcccagaaattcaatgggctgaccgtgctgcctcccctgctgaccgacgagatgatcgcccagtacaccagcgccctgctggccggcacaatcacctctggctggaccttcggcgccggcgccgccctgcagatcccatttgccatgcagatggcctacagatttaatgggatcggggtgacacagaacgtgctgtatgagaatcagaagctgattgccaatcagttcaacagcgccatcgggaagattcaggacagcctgtctagcacagcctctgccctgggcaagctgcaggatgtggtgaaccagaacgcccaggccctgaataccctggtgaaacagctgtctagcaatttcggggccattagctccgtgctgaatgatatcctgagccgcctggatccacctgaggccgaagtgcagatcgacaggctgatcaccggccggctgcagagcctgcagacctatgtgacccagcagctgattagagccgccgagatccgggcctccgccaacctggccgccaccaagatgtctgaatgcgtgctgggccagtctaaacgtgtggatttttgtgggaaggggtaccatctgatgagctttccccagagcgccccccacggggtggtgttcctgcacgtgacatacgtgcctgcccaggaaaaaaattttacaaccgcccctgccatctgccacgacggaaaggcccattttccaagagagggcgtgttcgtgtctaacgggacccattggtttgtgacccagcggaacttttacgagccccagatcattaccacagataacacctttgtgagcggaaattgtgatgtggtgattggcattgtgaacaataccgtgtacgatccactgcagcctgagctggactctttcaaggaggaactggacaagtatttcaaaaatcacacatcccctgacgtggatctgggagacattagcgggattaacgcctctgtggtgaatatccagaaggagatcgaccggctgaacgaggtggccaagaatctgaatgagagcctgatcgacctgcaggaactgggaaaatacgagcagtatatcaaatggccttggtacatctggctgggcttcatcgccgggctgatcgccatcgtgatggtgacaatcatgctgtgttgcatgacctcctgctgtagctgcctgaagggctgctgttcctgcggatcttgttgcaaatttgatgaagacgattctgagcccgtgctgaaaggcgtgaaactgcactatacatgataactcgagctggtactgcatgcacacaatgctagctgcccctttcccgtcctgggtaccccgagtctcccccgacctcgggtcccaggtatgctcccacctccacctgccccactcaccacctctgctagttccagacacctcccaagcacgcaacaatgcagctcaaaacgcttagcctagccacacccccacgggaaacagcagtgattaacctttagcaataaacgaaagtttaactaagctatactaaccccagggttggtcaatttcgtgccagccacaccctggagctagc

SEQ ID NO: 81 - RNA, 4307 nt, synthetic construct
  source 1..4307: mol_type = other RNA
agagaataaactagtattcttctggtccccacagactcagagagaacccgccaccatgtttgtgttcctggtgctgctgccactggtgagctctcagtgcgtgaatctgaccacacggacccagctgcccccagcctacaccaactcttttacaaggggagtgtattaccctgacaaggtgtttagatccagcgtgctgcacagcacccaggacctgttcctgccattcttttccaatgtgacatggttccacgccatccacgtgtctggaaccaatggaaccaagagattcgacaaccccgtgctgccctttaatgatggcgtgtacttcgccagcaccgagaaaagcaatatcattcgcgggtggattttcggaaccacactggactctaagacccagagcctgctgattgtgaacaatgccaccaacgtggtgattaaggtgtgtgagtttcagttctgtaatgaccccttcctgggagtgtattaccacaagaacaataaatcctggatggaatccgagttccgcgtgtactcttccgccaacaattgcacatttgagtacgtgtcccagccttttctgatggacctggagggcaagcagggaaattttaagaatctgagagaatttgtgttcaagaacatcgacggctacttcaagatttattctaagcatacacctatcaatctggtgcgcgatctgccacaggggttcagcgccctggaacctctggtggatctgccaattggaatcaatatcacacgcttccagaccctgctggccctgcaccgctcctacctgacacccggcgattctagctctgggtggaccgccggagccgccgcctactatgtgggatacctgcagccccgcaccttcctgctgaagtataatgaaaacggcaccattaccgacgccgtggactgtgccctggacccactgagcgaaaccaagtgcacactgaaatccttcaccgtggaaaaagggatctaccagaccagcaacttccgcgtgcagcctaccgaaagcattgtgcgctttcccaatattacaaacctgtgtccatttggcgaggtgttcaacgccacacgcttcgccagcgtgtatgcctggaaccggaaaagaatcagcaactgtgtggccgattacagcgtgctgtacaatagcgcctctttttccacatttaaatgttacggggtgtcccctacaaagctgaatgacctgtgtttcaccaatgtgtatgccgacagcttcgtgattagaggcgacgaggtgcggcagatcgccccaggacagacaggcaaaattgccgattataactacaaactgccagatgactttaccgggtgcgtgatcgcctggaatagcaacaatctggacagcaaagtggggggcaattacaactatctgtacagactgtttcgcaagtctaacctgaaaccattcgagagggacattagcacagagatctatcaggccggatccacaccatgtaacggcgtggaaggctttaattgttactttcccctgcagtcctatgggtttcagccaacaaatggggtggggtatcagccctacagggtggtggtgctgtcctttgaactgctgcatgcccctgccaccgtgtgcgggcctaagaaatctaccaacctggtgaagaataaatgcgtgaatttcaatttcaatgggctgacagggacaggcgtgctgaccgaatccaataagaaatttctgccattccagcagtttgggagggacatcgccgacacaaccgacgccgtgagggatccacagaccctggaaatcctggatattacaccctgtagcttcggcggggtgtccgtgattacaccagggacaaatacatccaaccaggtggccgtgctgtatcaggacgtgaattgtaccgaagtgcccgtggccatccatgccgaccagctgacacctacctggagggtgtatagcaccggcagcaacgtgttccagacaagagccgggtgcctgattggcgccgagcacgtgaacaatagctatgaatgcgatatcccaatcggcgccgggatctgcgcctcctaccagacccagacaaattcccccagacgggccagatctgtggcctcccagtctattatcgcctataccatgtctctgggcgccgagaacagcgtggcctattctaacaattctattgccattcccacaaatttcacaattagcgtgaccacagaaatcctgcccgtgtctatgacaaagacctccgtggattgtacaatgtatatttgtggcgacagcacagagtgcagcaacctgctgctgcagtacggctctttctgcacacagctgaaccgcgccctgacaggtattgccgtggagcaggataaaaacacacaggaagtgtttgcccaggtgaagcagatttacaaaacaccacccattaaagacttcggcggattcaacttctcccagatcctgcctgaccccagcaaaccttccaagagaagctttatcgaggacctgctgtttaacaaagtgaccctggccgatgccggatttatcaaacagtacggggactgcctgggcgatattgccgccagagatctgatctgtgcccagaaattcaatgggctgaccgtgctgcctcccctgctgaccgacgagatgatcgcccagtacaccagcgccctgctggccggcacaatcacctctggctggaccttcggcgccggcgccgccctgcagatcccatttgccatgcagatggcctacagatttaatgggatcggggtgacacagaacgtgctgtatgagaatcagaagctgattgccaatcagttcaacagcgccatcgggaagattcaggacagcctgtctagcacagcctctgccctgggcaagctgcaggatgtggtgaaccagaacgcccaggccctgaataccctggtgaaacagctgtctagcaatttcggggccattagctccgtgctgaatgatatcctgagccgcctggatccacctgaggccgaagtgcagatcgacaggctgatcaccggccggctgcagagcctgcagacctatgtgacccagcagctgattagagccgccgagatccgggcctccgccaacctggccgccaccaagatgtctgaatgcgtgctgggccagtctaaacgtgtggatttttgtgggaaggggtaccatctgatgagctttccccagagcgccccccacggggtggtgttcctgcacgtgacatacgtgcctgcccaggaaaaaaattttacaaccgcccctgccatctgccacgacggaaaggcccattttccaagagagggcgtgttcgtgtctaacgggacccattggtttgtgacccagcggaacttttacgagccccagatcattaccacagataacacctttgtgagcggaaattgtgatgtggtgattggcattgtgaacaataccgtgtacgatccactgcagcctgagctggactctttcaaggaggaactggacaagtatttcaaaaatcacacatcccctgacgtggatctgggagacattagcgggattaacgcctctgtggtgaatatccagaaggagatcgaccggctgaacgaggtggccaagaatctgaatgagagcctgatcgacctgcaggaactgggaaaatacgagcagtatatcaaatggccttggtacatctggctgggcttcatcgccgggctgatcgccatcgtgatggtgacaatcatgctgtgttgcatgacctcctgctgtagctgcctgaagggctgctgttcctgcggatcttgttgcaaatttgatgaagacgattctgagcccgtgctgaaaggcgtgaaactgcactatacatgataactcgagctggtactgcatgcacacaatgctagctgcccctttcccgtcctgggtaccccgagtctcccccgacctcgggtcccaggtatgctcccacctccacctgccccactcaccacctctgctagttccagacacctcccaagcacgcaacaatgcagctcaaaacgcttagcctagccacacccccacgggaaacagcagtgattaacctttagcaataaacgaaagtttaactaagctatactaaccccagggttggtcaatttcgtgccagccacaccctggagctagcttcattgcaaaaaaaaaaaaaaaaaaaaaaaaaaaaaagcatatgactaaaaaaaaaaaaaaaaaaaaaaaaaaaaaaaaaaaaaaaaaaaaaaaaaaaaaaaaaaaaaaaaaaaaaaaaaaaaaaaaaaaa

SEQ ID NO: 82 - RNA, 4313 nt, synthetic construct
  source 1..4313: mol_type = other RNA
agaacgcccccaaaatctgtttctaattttacagaaatcttttgaaacttggcacggtattcaaaagtccgtggaaagaaaaaaaccttgtcctggcttcagcttccaactacaaagacagacttggtccttttcaacggttttcacagatccagtgacccacgctctgaagacagaattagctaactttcaaaaacatctggaaaaatgtttgtgttcctggtgctgctgccactggtgagctctcagtgcgtgaatctgaccacacggacccagctgcccccagcctacaccaactcttttacaaggggagtgtattaccctgacaaggtgtttagatccagcgtgctgcacagcacccaggacctgttcctgccattcttttccaatgtgacatggttccacgccatccacgtgtctggaaccaatggaaccaagagattcgacaaccccgtgctgccctttaatgatggcgtgtacttcgccagcaccgagaaaagcaatatcattcgcgggtggattttcggaaccacactggactctaagacccagagcctgctgattgtgaacaatgccaccaacgtggtgattaaggtgtgtgagtttcagttctgtaatgaccccttcctgggagtgtattaccacaagaacaataaatcctggatggaatccgagttccgcgtgtactcttccgccaacaattgcacatttgagtacgtgtcccagccttttctgatggacctggagggcaagcagggaaattttaagaatctgagagaatttgtgttcaagaacatcgacggctacttcaagatttattctaagcatacacctatcaatctggtgcgcgatctgccacaggggttcagcgccctggaacctctggtggatctgccaattggaatcaatatcacacgcttccagaccctgctggccctgcaccgctcctacctgacacccggcgattctagctctgggtggaccgccggagccgccgcctactatgtgggatacctgcagccccgcaccttcctgctgaagtataatgaaaacggcaccattaccgacgccgtggactgtgccctggacccactgagcgaaaccaagtgcacactgaaatccttcaccgtggaaaaagggatctaccagaccagcaacttccgcgtgcagcctaccgaaagcattgtgcgctttcccaatattacaaacctgtgtccatttggcgaggtgttcaacgccacacgcttcgccagcgtgtatgcctggaaccggaaaagaatcagcaactgtgtggccgattacagcgtgctgtacaatagcgcctctttttccacatttaaatgttacggggtgtcccctacaaagctgaatgacctgtgtttcaccaatgtgtatgccgacagcttcgtgattagaggcgacgaggtgcggcagatcgccccaggacagacaggcaaaattgccgattataactacaaactgccagatgactttaccgggtgcgtgatcgcctggaatagcaacaatctggacagcaaagtggggggcaattacaactatctgtacagactgtttcgcaagtctaacctgaaaccattcgagagggacattagcacagagatctatcaggccggatccacaccatgtaacggcgtggaaggctttaattgttactttcccctgcagtcctatgggtttcagccaacaaatggggtggggtatcagccctacagggtggtggtgctgtcctttgaactgctgcatgcccctgccaccgtgtgcgggcctaagaaatctaccaacctggtgaagaataaatgcgtgaatttcaatttcaatgggctgacagggacaggcgtgctgaccgaatccaataagaaatttctgccattccagcagtttgggagggacatcgccgacacaaccgacgccgtgagggatccacagaccctggaaatcctggatattacaccctgtagcttcggcggggtgtccgtgattacaccagggacaaatacatccaaccaggtggccgtgctgtatcaggacgtgaattgtaccgaagtgcccgtggccatccatgccgaccagctgacacctacctggagggtgtatagcaccggcagcaacgtgttccagacaagagccgggtgcctgattggcgccgagcacgtgaacaatagctatgaatgcgatatcccaatcggcgccgggatctgcgcctcctaccagacccagacaaattcccccagacgggccagatctgtggcctcccagtctattatcgcctataccatgtctctgggcgccgagaacagcgtggcctattctaacaattctattgccattcccacaaatttcacaattagcgtgaccacagaaatcctgcccgtgtctatgacaaagacctccgtggattgtacaatgtatatttgtggcgacagcacagagtgcagcaacctgctgctgcagtacggctctttctgcacacagctgaaccgcgccctgacaggtattgccgtggagcaggataaaaacacacaggaagtgtttgcccaggtgaagcagatttacaaaacaccacccattaaagacttcggcggattcaacttctcccagatcctgcctgaccccagcaaaccttccaagagaagctttatcgaggacctgctgtttaacaaagtgaccctggccgatgccggatttatcaaacagtacggggactgcctgggcgatattgccgccagagatctgatctgtgcccagaaattcaatgggctgaccgtgctgcctcccctgctgaccgacgagatgatcgcccagtacaccagcgccctgctggccggcacaatcacctctggctggaccttcggcgccggcgccgccctgcagatcccatttgccatgcagatggcctacagatttaatgggatcggggtgacacagaacgtgctgtatgagaatcagaagctgattgccaatcagttcaacagcgccatcgggaagattcaggacagcctgtctagcacagcctctgccctgggcaagctgcaggatgtggtgaaccagaacgcccaggccctgaataccctggtgaaacagctgtctagcaatttcggggccattagctccgtgctgaatgatatcctgagccgcctggatccacctgaggccgaagtgcagatcgacaggctgatcaccggccggctgcagagcctgcagacctatgtgacccagcagctgattagagccgccgagatccgggcctccgccaacctggccgccaccaagatgtctgaatgcgtgctgggccagtctaaacgtgtggatttttgtgggaaggggtaccatctgatgagctttccccagagcgccccccacggggtggtgttcctgcacgtgacatacgtgcctgcccaggaaaaaaattttacaaccgcccctgccatctgccacgacggaaaggcccattttccaagagagggcgtgttcgtgtctaacgggacccattggtttgtgacccagcggaacttttacgagccccagatcattaccacagataacacctttgtgagcggaaattgtgatgtggtgattggcattgtgaacaataccgtgtacgatccactgcagcctgagctggactctttcaaggaggaactggacaagtatttcaaaaatcacacatcccctgacgtggatctgggagacattagcgggattaacgcctctgtggtgaatatccagaaggagatcgaccggctgaacgaggtggccaagaatctgaatgagagcctgatcgacctgcaggaactgggaaaatacgagcagtatatcaaatggccttggtacatctggctgggcttcatcgccgggctgatcgccatcgtgatggtgacaatcatgctgtgttgcatgacctcctgctgtagctgcctgaagggctgctgttcctgcggatcttgttgcaaatttgatgaagacgattctgagcccgtgctgaaaggcgtgaaactgcactatacatagaaacgatgcagatgcaagcctgtatcagaatctgaaaaccttatataaacccctcagacagtttgcttattttattttttatgttgtaaaatgctagtataaacaaacaaattaatgttgttctaaaggctgttaaaaaaaagatgaggactcagaagttcaagctaaatattgtttacattttctggtactctgtgaaagaagagaaaagggagtcatgcattttgctttggacacagtgttttatcacctgttcatttgaagaaaaataataaagtcagaag

SEQ ID NO: 83 - RNA, 4321 nt, synthetic construct
  source 1..4321: mol_type = other RNA
agaacgcccccaaaatctgtttctaattttacagaaatcttttgaaacttggcacggtattcaaaagtccgtggaaagaaaaaaaccttgtcctggcttcagcttccaactacaaagacagacttggtccttttcaacggttttcacagatccagtgacccacgctctgaagacagaattagctaactttcaaaaacatctggaaaaatgtttgtgttcctggtgctgctgccactggtgagctctcagtgcgtgaatctgaccacacggacccagctgcccccagcctacaccaactcttttacaaggggagtgtattaccctgacaaggtgtttagatccagcgtgctgcacagcacccaggacctgttcctgccattcttttccaatgtgacatggttccacgccatccacgtgtctggaaccaatggaaccaagagattcgacaaccccgtgctgccctttaatgatggcgtgtacttcgccagcaccgagaaaagcaatatcattcgcgggtggattttcggaaccacactggactctaagacccagagcctgctgattgtgaacaatgccaccaacgtggtgattaaggtgtgtgagtttcagttctgtaatgaccccttcctgggagtgtattaccacaagaacaataaatcctggatggaatccgagttccgcgtgtactcttccgccaacaattgcacatttgagtacgtgtcccagccttttctgatggacctggagggcaagcagggaaattttaagaatctgagagaatttgtgttcaagaacatcgacggctacttcaagatttattctaagcatacacctatcaatctggtgcgcgatctgccacaggggttcagcgccctggaacctctggtggatctgccaattggaatcaatatcacacgcttccagaccctgctggccctgcaccgctcctacctgacacccggcgattctagctctgggtggaccgccggagccgccgcctactatgtgggatacctgcagccccgcaccttcctgctgaagtataatgaaaacggcaccattaccgacgccgtggactgtgccctggacccactgagcgaaaccaagtgcacactgaaatccttcaccgtggaaaaagggatctaccagaccagcaacttccgcgtgcagcctaccgaaagcattgtgcgctttcccaatattacaaacctgtgtccatttggcgaggtgttcaacgccacacgcttcgccagcgtgtatgcctggaaccggaaaagaatcagcaactgtgtggccgattacagcgtgctgtacaatagcgcctctttttccacatttaaatgttacggggtgtcccctacaaagctgaatgacctgtgtttcaccaatgtgtatgccgacagcttcgtgattagaggcgacgaggtgcggcagatcgccccaggacagacaggcaaaattgccgattataactacaaactgccagatgactttaccgggtgcgtgatcgcctggaatagcaacaatctggacagcaaagtggggggcaattacaactatctgtacagactgtttcgcaagtctaacctgaaaccattcgagagggacattagcacagagatctatcaggccggatccacaccatgtaacggcgtggaaggctttaattgttactttcccctgcagtcctatgggtttcagccaacaaatggggtggggtatcagccctacagggtggtggtgctgtcctttgaactgctgcatgcccctgccaccgtgtgcgggcctaagaaatctaccaacctggtgaagaataaatgcgtgaatttcaatttcaatgggctgacagggacaggcgtgctgaccgaatccaataagaaatttctgccattccagcagtttgggagggacatcgccgacacaaccgacgccgtgagggatccacagaccctggaaatcctggatattacaccctgtagcttcggcggggtgtccgtgattacaccagggacaaatacatccaaccaggtggccgtgctgtatcaggacgtgaattgtaccgaagtgcccgtggccatccatgccgaccagctgacacctacctggagggtgtatagcaccggcagcaacgtgttccagacaagagccgggtgcctgattggcgccgagcacgtgaacaatagctatgaatgcgatatcccaatcggcgccgggatctgcgcctcctaccagacccagacaaattcccccagacgggccagatctgtggcctcccagtctattatcgcctataccatgtctctgggcgccgagaacagcgtggcctattctaacaattctattgccattcccacaaatttcacaattagcgtgaccacagaaatcctgcccgtgtctatgacaaagacctccgtggattgtacaatgtatatttgtggcgacagcacagagtgcagcaacctgctgctgcagtacggctctttctgcacacagctgaaccgcgccctgacaggtattgccgtggagcaggataaaaacacacaggaagtgtttgcccaggtgaagcagatttacaaaacaccacccattaaagacttcggcggattcaacttctcccagatcctgcctgaccccagcaaaccttccaagagaagctttatcgaggacctgctgtttaacaaagtgaccctggccgatgccggatttatcaaacagtacggggactgcctgggcgatattgccgccagagatctgatctgtgcccagaaattcaatgggctgaccgtgctgcctcccctgctgaccgacgagatgatcgcccagtacaccagcgccctgctggccggcacaatcacctctggctggaccttcggcgccggcgccgccctgcagatcccatttgccatgcagatggcctacagatttaatgggatcggggtgacacagaacgtgctgtatgagaatcagaagctgattgccaatcagttcaacagcgccatcgggaagattcaggacagcctgtctagcacagcctctgccctgggcaagctgcaggatgtggtgaaccagaacgcccaggccctgaataccctggtgaaacagctgtctagcaatttcggggccattagctccgtgctgaatgatatcctgagccgcctggatccacctgaggccgaagtgcagatcgacaggctgatcaccggccggctgcagagcctgcagacctatgtgacccagcagctgattagagccgccgagatccgggcctccgccaacctggccgccaccaagatgtctgaatgcgtgctgggccagtctaaacgtgtggatttttgtgggaaggggtaccatctgatgagctttccccagagcgccccccacggggtggtgttcctgcacgtgacatacgtgcctgcccaggaaaaaaattttacaaccgcccctgccatctgccacgacggaaaggcccattttccaagagagggcgtgttcgtgtctaacgggacccattggtttgtgacccagcggaacttttacgagccccagatcattaccacagataacacctttgtgagcggaaattgtgatgtggtgattggcattgtgaacaataccgtgtacgatccactgcagcctgagctggactctttcaaggaggaactggacaagtatttcaaaaatcacacatcccctgacgtggatctgggagacattagcgggattaacgcctctgtggtgaatatccagaaggagatcgaccggctgaacgaggtggccaagaatctgaatgagagcctgatcgacctgcaggaactgggaaaatacgagcagtatatcaaatggccttggtacatctggctgggcttcatcgccgggctgatcgccatcgtgatggtgacaatcatgctgtgttgcatgacctcctgctgtagctgcctgaagggctgctgttcctgcggatcttgttgcaaatttgatgaagacgattctgagcccgtgctgaaaggcgtgaaactgcactatacatagaaacgatgcagatgcaagcctgtatcagaatctgaaaaccttatataaacccctcagacagtttgcttattttattttttatgttgtaaaatgctagtataaacaaacaaattaatgttgttctaaaggctgttaaaaaaaagatgaggactcagaagttcaagctaaatattgtttacattttctggtactctgtgaaagaagagaaaagggagtcatgcattttgctttggacacagtgttttatcacctgttcatttgaagaaaaataataaagtcagaagttcattgc

SEQ ID NO: 84 - RNA, 4449 nt, synthetic construct
  source 1..4449: mol_type = other RNA
aggaagaacgcccccaaaatctgtttctaattttacagaaatcttttgaaacttggcacggtattcaaaagtccgtggaaagaaaaaaaccttgtcctggcttcagcttccaactacaaagacagacttggtccttttcaacggttttcacagatccagtgacccacgctctgaagacagaattagctaactttcaaaaacatctggaaaaatgtttgtgttcctggtgctgctgccactggtgagctctcagtgcgtgaatctgaccacacggacccagctgcccccagcctacaccaactcttttacaaggggagtgtattaccctgacaaggtgtttagatccagcgtgctgcacagcacccaggacctgttcctgccattcttttccaatgtgacatggttccacgccatccacgtgtctggaaccaatggaaccaagagattcgacaaccccgtgctgccctttaatgatggcgtgtacttcgccagcaccgagaaaagcaatatcattcgcgggtggattttcggaaccacactggactctaagacccagagcctgctgattgtgaacaatgccaccaacgtggtgattaaggtgtgtgagtttcagttctgtaatgaccccttcctgggagtgtattaccacaagaacaataaatcctggatggaatccgagttccgcgtgtactcttccgccaacaattgcacatttgagtacgtgtcccagccttttctgatggacctggagggcaagcagggaaattttaagaatctgagagaatttgtgttcaagaacatcgacggctacttcaagatttattctaagcatacacctatcaatctggtgcgcgatctgccacaggggttcagcgccctggaacctctggtggatctgccaattggaatcaatatcacacgcttccagaccctgctggccctgcaccgctcctacctgacacccggcgattctagctctgggtggaccgccggagccgccgcctactatgtgggatacctgcagccccgcaccttcctgctgaagtataatgaaaacggcaccattaccgacgccgtggactgtgccctggacccactgagcgaaaccaagtgcacactgaaatccttcaccgtggaaaaagggatctaccagaccagcaacttccgcgtgcagcctaccgaaagcattgtgcgctttcccaatattacaaacctgtgtccatttggcgaggtgttcaacgccacacgcttcgccagcgtgtatgcctggaaccggaaaagaatcagcaactgtgtggccgattacagcgtgctgtacaatagcgcctctttttccacatttaaatgttacggggtgtcccctacaaagctgaatgacctgtgtttcaccaatgtgtatgccgacagcttcgtgattagaggcgacgaggtgcggcagatcgccccaggacagacaggcaaaattgccgattataactacaaactgccagatgactttaccgggtgcgtgatcgcctggaatagcaacaatctggacagcaaagtggggggcaattacaactatctgtacagactgtttcgcaagtctaacctgaaaccattcgagagggacattagcacagagatctatcaggccggatccacaccatgtaacggcgtggaaggctttaattgttactttcccctgcagtcctatgggtttcagccaacaaatggggtggggtatcagccctacagggtggtggtgctgtcctttgaactgctgcatgcccctgccaccgtgtgcgggcctaagaaatctaccaacctggtgaagaataaatgcgtgaatttcaatttcaatgggctgacagggacaggcgtgctgaccgaatccaataagaaatttctgccattccagcagtttgggagggacatcgccgacacaaccgacgccgtgagggatccacagaccctggaaatcctggatattacaccctgtagcttcggcggggtgtccgtgattacaccagggacaaatacatccaaccaggtggccgtgctgtatcaggacgtgaattgtaccgaagtgcccgtggccatccatgccgaccagctgacacctacctggagggtgtatagcaccggcagcaacgtgttccagacaagagccgggtgcctgattggcgccgagcacgtgaacaatagctatgaatgcgatatcccaatcggcgccgggatctgcgcctcctaccagacccagacaaattcccccagacgggccagatctgtggcctcccagtctattatcgcctataccatgtctctgggcgccgagaacagcgtggcctattctaacaattctattgccattcccacaaatttcacaattagcgtgaccacagaaatcctgcccgtgtctatgacaaagacctccgtggattgtacaatgtatatttgtggcgacagcacagagtgcagcaacctgctgctgcagtacggctctttctgcacacagctgaaccgcgccctgacaggtattgccgtggagcaggataaaaacacacaggaagtgtttgcccaggtgaagcagatttacaaaacaccacccattaaagacttcggcggattcaacttctcccagatcctgcctgaccccagcaaaccttccaagagaagctttatcgaggacctgctgtttaacaaagtgaccctggccgatgccggatttatcaaacagtacggggactgcctgggcgatattgccgccagagatctgatctgtgcccagaaattcaatgggctgaccgtgctgcctcccctgctgaccgacgagatgatcgcccagtacaccagcgccctgctggccggcacaatcacctctggctggaccttcggcgccggcgccgccctgcagatcccatttgccatgcagatggcctacagatttaatgggatcggggtgacacagaacgtgctgtatgagaatcagaagctgattgccaatcagttcaacagcgccatcgggaagattcaggacagcctgtctagcacagcctctgccctgggcaagctgcaggatgtggtgaaccagaacgcccaggccctgaataccctggtgaaacagctgtctagcaatttcggggccattagctccgtgctgaatgatatcctgagccgcctggatccacctgaggccgaagtgcagatcgacaggctgatcaccggccggctgcagagcctgcagacctatgtgacccagcagctgattagagccgccgagatccgggcctccgccaacctggccgccaccaagatgtctgaatgcgtgctgggccagtctaaacgtgtggatttttgtgggaaggggtaccatctgatgagctttccccagagcgccccccacggggtggtgttcctgcacgtgacatacgtgcctgcccaggaaaaaaattttacaaccgcccctgccatctgccacgacggaaaggcccattttccaagagagggcgtgttcgtgtctaacgggacccattggtttgtgacccagcggaacttttacgagccccagatcattaccacagataacacctttgtgagcggaaattgtgatgtggtgattggcattgtgaacaataccgtgtacgatccactgcagcctgagctggactctttcaaggaggaactggacaagtatttcaaaaatcacacatcccctgacgtggatctgggagacattagcgggattaacgcctctgtggtgaatatccagaaggagatcgaccggctgaacgaggtggccaagaatctgaatgagagcctgatcgacctgcaggaactgggaaaatacgagcagtatatcaaatggccttggtacatctggctgggcttcatcgccgggctgatcgccatcgtgatggtgacaatcatgctgtgttgcatgacctcctgctgtagctgcctgaagggctgctgttcctgcggatcttgttgcaaatttgatgaagacgattctgagcccgtgctgaaaggcgtgaaactgcactatacatagaaacgatgcagatgcaagcctgtatcagaatctgaaaaccttatataaacccctcagacagtttgcttattttattttttatgttgtaaaatgctagtataaacaaacaaattaatgttgttctaaaggctgttaaaaaaaagatgaggactcagaagttcaagctaaatattgtttacattttctggtactctgtgaaagaagagaaaagggagtcatgcattttgctttggacacagtgttttatcacctgttcatttgaagaaaaataataaagtcagaagttcattgcaaaaaaaaaaaaaaaaaaaaaaaaaaaaaagcatatgactaaaaaaaaaaaaaaaaaaaaaaaaaaaaaaaaaaaaaaaaaaaaaaaaaaaaaaaaaaaaaaaaaaaaaaaaaaaaaaaaaaaa

SEQ ID NO: 85 - RNA, 3905 nt, synthetic construct
  source 1..3905: mol_type = other RNA
agaagctgtctatcgggctccagcggtcatgtttgtgttcctggtgctgctgccactggtgagctctcagtgcgtgaatctgaccacacggacccagctgcccccagcctacaccaactcttttacaaggggagtgtattaccctgacaaggtgtttagatccagcgtgctgcacagcacccaggacctgttcctgccattcttttccaatgtgacatggttccacgccatccacgtgtctggaaccaatggaaccaagagattcgacaaccccgtgctgccctttaatgatggcgtgtacttcgccagcaccgagaaaagcaatatcattcgcgggtggattttcggaaccacactggactctaagacccagagcctgctgattgtgaacaatgccaccaacgtggtgattaaggtgtgtgagtttcagttctgtaatgaccccttcctgggagtgtattaccacaagaacaataaatcctggatggaatccgagttccgcgtgtactcttccgccaacaattgcacatttgagtacgtgtcccagccttttctgatggacctggagggcaagcagggaaattttaagaatctgagagaatttgtgttcaagaacatcgacggctacttcaagatttattctaagcatacacctatcaatctggtgcgcgatctgccacaggggttcagcgccctggaacctctggtggatctgccaattggaatcaatatcacacgcttccagaccctgctggccctgcaccgctcctacctgacacccggcgattctagctctgggtggaccgccggagccgccgcctactatgtgggatacctgcagccccgcaccttcctgctgaagtataatgaaaacggcaccattaccgacgccgtggactgtgccctggacccactgagcgaaaccaagtgcacactgaaatccttcaccgtggaaaaagggatctaccagaccagcaacttccgcgtgcagcctaccgaaagcattgtgcgctttcccaatattacaaacctgtgtccatttggcgaggtgttcaacgccacacgcttcgccagcgtgtatgcctggaaccggaaaagaatcagcaactgtgtggccgattacagcgtgctgtacaatagcgcctctttttccacatttaaatgttacggggtgtcccctacaaagctgaatgacctgtgtttcaccaatgtgtatgccgacagcttcgtgattagaggcgacgaggtgcggcagatcgccccaggacagacaggcaaaattgccgattataactacaaactgccagatgactttaccgggtgcgtgatcgcctggaatagcaacaatctggacagcaaagtggggggcaattacaactatctgtacagactgtttcgcaagtctaacctgaaaccattcgagagggacattagcacagagatctatcaggccggatccacaccatgtaacggcgtggaaggctttaattgttactttcccctgcagtcctatgggtttcagccaacaaatggggtggggtatcagccctacagggtggtggtgctgtcctttgaactgctgcatgcccctgccaccgtgtgcgggcctaagaaatctaccaacctggtgaagaataaatgcgtgaatttcaatttcaatgggctgacagggacaggcgtgctgaccgaatccaataagaaatttctgccattccagcagtttgggagggacatcgccgacacaaccgacgccgtgagggatccacagaccctggaaatcctggatattacaccctgtagcttcggcggggtgtccgtgattacaccagggacaaatacatccaaccaggtggccgtgctgtatcaggacgtgaattgtaccgaagtgcccgtggccatccatgccgaccagctgacacctacctggagggtgtatagcaccggcagcaacgtgttccagacaagagccgggtgcctgattggcgccgagcacgtgaacaatagctatgaatgcgatatcccaatcggcgccgggatctgcgcctcctaccagacccagacaaattcccccagacgggccagatctgtggcctcccagtctattatcgcctataccatgtctctgggcgccgagaacagcgtggcctattctaacaattctattgccattcccacaaatttcacaattagcgtgaccacagaaatcctgcccgtgtctatgacaaagacctccgtggattgtacaatgtatatttgtggcgacagcacagagtgcagcaacctgctgctgcagtacggctctttctgcacacagctgaaccgcgccctgacaggtattgccgtggagcaggataaaaacacacaggaagtgtttgcccaggtgaagcagatttacaaaacaccacccattaaagacttcggcggattcaacttctcccagatcctgcctgaccccagcaaaccttccaagagaagctttatcgaggacctgctgtttaacaaagtgaccctggccgatgccggatttatcaaacagtacggggactgcctgggcgatattgccgccagagatctgatctgtgcccagaaattcaatgggctgaccgtgctgcctcccctgctgaccgacgagatgatcgcccagtacaccagcgccctgctggccggcacaatcacctctggctggaccttcggcgccggcgccgccctgcagatcccatttgccatgcagatggcctacagatttaatgggatcggggtgacacagaacgtgctgtatgagaatcagaagctgattgccaatcagttcaacagcgccatcgggaagattcaggacagcctgtctagcacagcctctgccctgggcaagctgcaggatgtggtgaaccagaacgcccaggccctgaataccctggtgaaacagctgtctagcaatttcggggccattagctccgtgctgaatgatatcctgagccgcctggatccacctgaggccgaagtgcagatcgacaggctgatcaccggccggctgcagagcctgcagacctatgtgacccagcagctgattagagccgccgagatccgggcctccgccaacctggccgccaccaagatgtctgaatgcgtgctgggccagtctaaacgtgtggatttttgtgggaaggggtaccatctgatgagctttccccagagcgccccccacggggtggtgttcctgcacgtgacatacgtgcctgcccaggaaaaaaattttacaaccgcccctgccatctgccacgacggaaaggcccattttccaagagagggcgtgttcgtgtctaacgggacccattggtttgtgacccagcggaacttttacgagccccagatcattaccacagataacacctttgtgagcggaaattgtgatgtggtgattggcattgtgaacaataccgtgtacgatccactgcagcctgagctggactctttcaaggaggaactggacaagtatttcaaaaatcacacatcccctgacgtggatctgggagacattagcgggattaacgcctctgtggtgaatatccagaaggagatcgaccggctgaacgaggtggccaagaatctgaatgagagcctgatcgacctgcaggaactgggaaaatacgagcagtatatcaaatggccttggtacatctggctgggcttcatcgccgggctgatcgccatcgtgatggtgacaatcatgctgtgttgcatgacctcctgctgtagctgcctgaagggctgctgttcctgcggatcttgttgcaaatttgatgaagacgattctgagcccgtgctgaaaggcgtgaaactgcactatacatagccgccgctccagctttgcacgtttcgatcccaaaggccctttttagggccgacca

SEQ ID NO: 86 - RNA, 3913 nt, synthetic construct
  source 1..3913: mol_type = other RNA
agaagctgtctatcgggctccagcggtcatgtttgtgttcctggtgctgctgccactggtgagctctcagtgcgtgaatctgaccacacggacccagctgcccccagcctacaccaactcttttacaaggggagtgtattaccctgacaaggtgtttagatccagcgtgctgcacagcacccaggacctgttcctgccattcttttccaatgtgacatggttccacgccatccacgtgtctggaaccaatggaaccaagagattcgacaaccccgtgctgccctttaatgatggcgtgtacttcgccagcaccgagaaaagcaatatcattcgcgggtggattttcggaaccacactggactctaagacccagagcctgctgattgtgaacaatgccaccaacgtggtgattaaggtgtgtgagtttcagttctgtaatgaccccttcctgggagtgtattaccacaagaacaataaatcctggatggaatccgagttccgcgtgtactcttccgccaacaattgcacatttgagtacgtgtcccagccttttctgatggacctggagggcaagcagggaaattttaagaatctgagagaatttgtgttcaagaacatcgacggctacttcaagatttattctaagcatacacctatcaatctggtgcgcgatctgccacaggggttcagcgccctggaacctctggtggatctgccaattggaatcaatatcacacgcttccagaccctgctggccctgcaccgctcctacctgacacccggcgattctagctctgggtggaccgccggagccgccgcctactatgtgggatacctgcagccccgcaccttcctgctgaagtataatgaaaacggcaccattaccgacgccgtggactgtgccctggacccactgagcgaaaccaagtgcacactgaaatccttcaccgtggaaaaagggatctaccagaccagcaacttccgcgtgcagcctaccgaaagcattgtgcgctttcccaatattacaaacctgtgtccatttggcgaggtgttcaacgccacacgcttcgccagcgtgtatgcctggaaccggaaaagaatcagcaactgtgtggccgattacagcgtgctgtacaatagcgcctctttttccacatttaaatgttacggggtgtcccctacaaagctgaatgacctgtgtttcaccaatgtgtatgccgacagcttcgtgattagaggcgacgaggtgcggcagatcgccccaggacagacaggcaaaattgccgattataactacaaactgccagatgactttaccgggtgcgtgatcgcctggaatagcaacaatctggacagcaaagtggggggcaattacaactatctgtacagactgtttcgcaagtctaacctgaaaccattcgagagggacattagcacagagatctatcaggccggatccacaccatgtaacggcgtggaaggctttaattgttactttcccctgcagtcctatgggtttcagccaacaaatggggtggggtatcagccctacagggtggtggtgctgtcctttgaactgctgcatgcccctgccaccgtgtgcgggcctaagaaatctaccaacctggtgaagaataaatgcgtgaatttcaatttcaatgggctgacagggacaggcgtgctgaccgaatccaataagaaatttctgccattccagcagtttgggagggacatcgccgacacaaccgacgccgtgagggatccacagaccctggaaatcctggatattacaccctgtagcttcggcggggtgtccgtgattacaccagggacaaatacatccaaccaggtggccgtgctgtatcaggacgtgaattgtaccgaagtgcccgtggccatccatgccgaccagctgacacctacctggagggtgtatagcaccggcagcaacgtgttccagacaagagccgggtgcctgattggcgccgagcacgtgaacaatagctatgaatgcgatatcccaatcggcgccgggatctgcgcctcctaccagacccagacaaattcccccagacgggccagatctgtggcctcccagtctattatcgcctataccatgtctctgggcgccgagaacagcgtggcctattctaacaattctattgccattcccacaaatttcacaattagcgtgaccacagaaatcctgcccgtgtctatgacaaagacctccgtggattgtacaatgtatatttgtggcgacagcacagagtgcagcaacctgctgctgcagtacggctctttctgcacacagctgaaccgcgccctgacaggtattgccgtggagcaggataaaaacacacaggaagtgtttgcccaggtgaagcagatttacaaaacaccacccattaaagacttcggcggattcaacttctcccagatcctgcctgaccccagcaaaccttccaagagaagctttatcgaggacctgctgtttaacaaagtgaccctggccgatgccggatttatcaaacagtacggggactgcctgggcgatattgccgccagagatctgatctgtgcccagaaattcaatgggctgaccgtgctgcctcccctgctgaccgacgagatgatcgcccagtacaccagcgccctgctggccggcacaatcacctctggctggaccttcggcgccggcgccgccctgcagatcccatttgccatgcagatggcctacagatttaatgggatcggggtgacacagaacgtgctgtatgagaatcagaagctgattgccaatcagttcaacagcgccatcgggaagattcaggacagcctgtctagcacagcctctgccctgggcaagctgcaggatgtggtgaaccagaacgcccaggccctgaataccctggtgaaacagctgtctagcaatttcggggccattagctccgtgctgaatgatatcctgagccgcctggatccacctgaggccgaagtgcagatcgacaggctgatcaccggccggctgcagagcctgcagacctatgtgacccagcagctgattagagccgccgagatccgggcctccgccaacctggccgccaccaagatgtctgaatgcgtgctgggccagtctaaacgtgtggatttttgtgggaaggggtaccatctgatgagctttccccagagcgccccccacggggtggtgttcctgcacgtgacatacgtgcctgcccaggaaaaaaattttacaaccgcccctgccatctgccacgacggaaaggcccattttccaagagagggcgtgttcgtgtctaacgggacccattggtttgtgacccagcggaacttttacgagccccagatcattaccacagataacacctttgtgagcggaaattgtgatgtggtgattggcattgtgaacaataccgtgtacgatccactgcagcctgagctggactctttcaaggaggaactggacaagtatttcaaaaatcacacatcccctgacgtggatctgggagacattagcgggattaacgcctctgtggtgaatatccagaaggagatcgaccggctgaacgaggtggccaagaatctgaatgagagcctgatcgacctgcaggaactgggaaaatacgagcagtatatcaaatggccttggtacatctggctgggcttcatcgccgggctgatcgccatcgtgatggtgacaatcatgctgtgttgcatgacctcctgctgtagctgcctgaagggctgctgttcctgcggatcttgttgcaaatttgatgaagacgattctgagcccgtgctgaaaggcgtgaaactgcactatacatagccgccgctccagctttgcacgtttcgatcccaaaggccctttttagggccgaccattcattgc

SEQ ID NO: 87 - RNA, 4040 nt, synthetic construct
  source 1..4040: mol_type = other RNA
aggagaagctgtctatcgggctccagcggtcatgtttgtgttcctggtgctgctgccactggtgagctctcagtgcgtgaatctgaccacacggacccagctgcccccagcctacaccaactcttttacaaggggagtgtattaccctgacaaggtgtttagatccagcgtgctgcacagcacccaggacctgttcctgccattcttttccaatgtgacatggttccacgccatccacgtgtctggaaccaatggaaccaagagattcgacaaccccgtgctgccctttaatgatggcgtgtacttcgccagcaccgagaaaagcaatatcattcgcgggtggattttcggaaccacactggactctaagacccagagcctgctgattgtgaacaatgccaccaacgtggtgattaaggtgtgtgagtttcagttctgtaatgaccccttcctgggagtgtattaccacaagaacaataaatcctggatggaatccgagttccgcgtgtactcttccgccaacaattgcacatttgagtacgtgtcccagccttttctgatggacctggagggcaagcagggaaattttaagaatctgagagaatttgtgttcaagaacatcgacggctacttcaagatttattctaagcatacacctatcaatctggtgcgcgatctgccacaggggttcagcgccctggaacctctggtggatctgccaattggaatcaatatcacacgcttccagaccctgctggccctgcaccgctcctacctgacacccggcgattctagctctgggtggaccgccggagccgccgcctactatgtgggatacctgcagccccgcaccttcctgctgaagtataatgaaaacggcaccattaccgacgccgtggactgtgccctggacccactgagcgaaaccaagtgcacactgaaatccttcaccgtggaaaaagggatctaccagaccagcaacttccgcgtgcagcctaccgaaagcattgtgcgctttcccaatattacaaacctgtgtccatttggcgaggtgttcaacgccacacgcttcgccagcgtgtatgcctggaaccggaaaagaatcagcaactgtgtggccgattacagcgtgctgtacaatagcgcctctttttccacatttaaatgttacggggtgtcccctacaaagctgaatgacctgtgtttcaccaatgtgtatgccgacagcttcgtgattagaggcgacgaggtgcggcagatcgccccaggacagacaggcaaaattgccgattataactacaaactgccagatgactttaccgggtgcgtgatcgcctggaatagcaacaatctggacagcaaagtggggggcaattacaactatctgtacagactgtttcgcaagtctaacctgaaaccattcgagagggacattagcacagagatctatcaggccggatccacaccatgtaacggcgtggaaggctttaattgttactttcccctgcagtcctatgggtttcagccaacaaatggggtggggtatcagccctacagggtggtggtgctgtcctttgaactgctgcatgcccctgccaccgtgtgcgggcctaagaaatctaccaacctggtgaagaataaatgcgtgaatttcaatttcaatgggctgacagggacaggcgtgctgaccgaatccaataagaaatttctgccattccagcagtttgggagggacatcgccgacacaaccgacgccgtgagggatccacagaccctggaaatcctggatattacaccctgtagcttcggcggggtgtccgtgattacaccagggacaaatacatccaaccaggtggccgtgctgtatcaggacgtgaattgtaccgaagtgcccgtggccatccatgccgaccagctgacacctacctggagggtgtatagcaccggcagcaacgtgttccagacaagagccgggtgcctgattggcgccgagcacgtgaacaatagctatgaatgcgatatcccaatcggcgccgggatctgcgcctcctaccagacccagacaaattcccccagacgggccagatctgtggcctcccagtctattatcgcctataccatgtctctgggcgccgagaacagcgtggcctattctaacaattctattgccattcccacaaatttcacaattagcgtgaccacagaaatcctgcccgtgtctatgacaaagacctccgtggattgtacaatgtatatttgtggcgacagcacagagtgcagcaacctgctgctgcagtacggctctttctgcacacagctgaaccgcgccctgacaggtattgccgtggagcaggataaaaacacacaggaagtgtttgcccaggtgaagcagatttacaaaacaccacccattaaagacttcggcggattcaacttctcccagatcctgcctgaccccagcaaaccttccaagagaagctttatcgaggacctgctgtttaacaaagtgaccctggccgatgccggatttatcaaacagtacggggactgcctgggcgatattgccgccagagatctgatctgtgcccagaaattcaatgggctgaccgtgctgcctcccctgctgaccgacgagatgatcgcccagtacaccagcgccctgctggccggcacaatcacctctggctggaccttcggcgccggcgccgccctgcagatcccatttgccatgcagatggcctacagatttaatgggatcggggtgacacagaacgtgctgtatgagaatcagaagctgattgccaatcagttcaacagcgccatcgggaagattcaggacagcctgtctagcacagcctctgccctgggcaagctgcaggatgtggtgaaccagaacgcccaggccctgaataccctggtgaaacagctgtctagcaatttcggggccattagctccgtgctgaatgatatcctgagccgcctggatccacctgaggccgaagtgcagatcgacaggctgatcaccggccggctgcagagcctgcagacctatgtgacccagcagctgattagagccgccgagatccgggcctccgccaacctggccgccaccaagatgtctgaatgcgtgctgggccagtctaaacgtgtggatttttgtgggaaggggtaccatctgatgagctttccccagagcgccccccacggggtggtgttcctgcacgtgacatacgtgcctgcccaggaaaaaaattttacaaccgcccctgccatctgccacgacggaaaggcccattttccaagagagggcgtgttcgtgtctaacgggacccattggtttgtgacccagcggaacttttacgagccccagatcattaccacagataacacctttgtgagcggaaattgtgatgtggtgattggcattgtgaacaataccgtgtacgatccactgcagcctgagctggactctttcaaggaggaactggacaagtatttcaaaaatcacacatcccctgacgtggatctgggagacattagcgggattaacgcctctgtggtgaatatccagaaggagatcgaccggctgaacgaggtggccaagaatctgaatgagagcctgatcgacctgcaggaactgggaaaatacgagcagtatatcaaatggccttggtacatctggctgggcttcatcgccgggctgatcgccatcgtgatggtgacaatcatgctgtgttgcatgacctcctgctgtagctgcctgaagggctgctgttcctgcggatcttgttgcaaatttgatgaagacgattctgagcccgtgctgaaaggcgtgaaactgcactatacatagccgccgctccagctttgcacgtttcgatcccaaaggccctttttagggccgaccattcattgcaaaaaaaaaaaaaaaaaaaaaaaaaaaaaagcatatgactaaaaaaaaaaaaaaaaaaaaaaaaaaaaaaaaaaaaaaaaaaaaaaaaaaaaaaaaaaaaaaaaaaaaaaaaaaaaaaaaaaaa

SEQ ID NO: 88 - RNA, 4076 nt, synthetic construct
  source 1..4076: mol_type = other RNA
gttccctatcactctctttaatcactactcacagtaacctcaactcctgccacaatgtttgtgttcctggtgctgctgccactggtgagctctcagtgcgtgaatctgaccacacggacccagctgcccccagcctacaccaactcttttacaaggggagtgtattaccctgacaaggtgtttagatccagcgtgctgcacagcacccaggacctgttcctgccattcttttccaatgtgacatggttccacgccatccacgtgtctggaaccaatggaaccaagagattcgacaaccccgtgctgccctttaatgatggcgtgtacttcgccagcaccgagaaaagcaatatcattcgcgggtggattttcggaaccacactggactctaagacccagagcctgctgattgtgaacaatgccaccaacgtggtgattaaggtgtgtgagtttcagttctgtaatgaccccttcctgggagtgtattaccacaagaacaataaatcctggatggaatccgagttccgcgtgtactcttccgccaacaattgcacatttgagtacgtgtcccagccttttctgatggacctggagggcaagcagggaaattttaagaatctgagagaatttgtgttcaagaacatcgacggctacttcaagatttattctaagcatacacctatcaatctggtgcgcgatctgccacaggggttcagcgccctggaacctctggtggatctgccaattggaatcaatatcacacgcttccagaccctgctggccctgcaccgctcctacctgacacccggcgattctagctctgggtggaccgccggagccgccgcctactatgtgggatacctgcagccccgcaccttcctgctgaagtataatgaaaacggcaccattaccgacgccgtggactgtgccctggacccactgagcgaaaccaagtgcacactgaaatccttcaccgtggaaaaagggatctaccagaccagcaacttccgcgtgcagcctaccgaaagcattgtgcgctttcccaatattacaaacctgtgtccatttggcgaggtgttcaacgccacacgcttcgccagcgtgtatgcctggaaccggaaaagaatcagcaactgtgtggccgattacagcgtgctgtacaatagcgcctctttttccacatttaaatgttacggggtgtcccctacaaagctgaatgacctgtgtttcaccaatgtgtatgccgacagcttcgtgattagaggcgacgaggtgcggcagatcgccccaggacagacaggcaaaattgccgattataactacaaactgccagatgactttaccgggtgcgtgatcgcctggaatagcaacaatctggacagcaaagtggggggcaattacaactatctgtacagactgtttcgcaagtctaacctgaaaccattcgagagggacattagcacagagatctatcaggccggatccacaccatgtaacggcgtggaaggctttaattgttactttcccctgcagtcctatgggtttcagccaacaaatggggtggggtatcagccctacagggtggtggtgctgtcctttgaactgctgcatgcccctgccaccgtgtgcgggcctaagaaatctaccaacctggtgaagaataaatgcgtgaatttcaatttcaatgggctgacagggacaggcgtgctgaccgaatccaataagaaatttctgccattccagcagtttgggagggacatcgccgacacaaccgacgccgtgagggatccacagaccctggaaatcctggatattacaccctgtagcttcggcggggtgtccgtgattacaccagggacaaatacatccaaccaggtggccgtgctgtatcaggacgtgaattgtaccgaagtgcccgtggccatccatgccgaccagctgacacctacctggagggtgtatagcaccggcagcaacgtgttccagacaagagccgggtgcctgattggcgccgagcacgtgaacaatagctatgaatgcgatatcccaatcggcgccgggatctgcgcctcctaccagacccagacaaattcccccagacgggccagatctgtggcctcccagtctattatcgcctataccatgtctctgggcgccgagaacagcgtggcctattctaacaattctattgccattcccacaaatttcacaattagcgtgaccacagaaatcctgcccgtgtctatgacaaagacctccgtggattgtacaatgtatatttgtggcgacagcacagagtgcagcaacctgctgctgcagtacggctctttctgcacacagctgaaccgcgccctgacaggtattgccgtggagcaggataaaaacacacaggaagtgtttgcccaggtgaagcagatttacaaaacaccacccattaaagacttcggcggattcaacttctcccagatcctgcctgaccccagcaaaccttccaagagaagctttatcgaggacctgctgtttaacaaagtgaccctggccgatgccggatttatcaaacagtacggggactgcctgggcgatattgccgccagagatctgatctgtgcccagaaattcaatgggctgaccgtgctgcctcccctgctgaccgacgagatgatcgcccagtacaccagcgccctgctggccggcacaatcacctctggctggaccttcggcgccggcgccgccctgcagatcccatttgccatgcagatggcctacagatttaatgggatcggggtgacacagaacgtgctgtatgagaatcagaagctgattgccaatcagttcaacagcgccatcgggaagattcaggacagcctgtctagcacagcctctgccctgggcaagctgcaggatgtggtgaaccagaacgcccaggccctgaataccctggtgaaacagctgtctagcaatttcggggccattagctccgtgctgaatgatatcctgagccgcctggatccacctgaggccgaagtgcagatcgacaggctgatcaccggccggctgcagagcctgcagacctatgtgacccagcagctgattagagccgccgagatccgggcctccgccaacctggccgccaccaagatgtctgaatgcgtgctgggccagtctaaacgtgtggatttttgtgggaaggggtaccatctgatgagctttccccagagcgccccccacggggtggtgttcctgcacgtgacatacgtgcctgcccaggaaaaaaattttacaaccgcccctgccatctgccacgacggaaaggcccattttccaagagagggcgtgttcgtgtctaacgggacccattggtttgtgacccagcggaacttttacgagccccagatcattaccacagataacacctttgtgagcggaaattgtgatgtggtgattggcattgtgaacaataccgtgtacgatccactgcagcctgagctggactctttcaaggaggaactggacaagtatttcaaaaatcacacatcccctgacgtggatctgggagacattagcgggattaacgcctctgtggtgaatatccagaaggagatcgaccggctgaacgaggtggccaagaatctgaatgagagcctgatcgacctgcaggaactgggaaaatacgagcagtatatcaaatggccttggtacatctggctgggcttcatcgccgggctgatcgccatcgtgatggtgacaatcatgctgtgttgcatgacctcctgctgtagctgcctgaagggctgctgttcctgcggatcttgttgcaaatttgatgaagacgattctgagcccgtgctgaaaggcgtgaaactgcactatacatagtaattaagtgcttcccacttaaaacatatcaggccttctatttatttaaatatttaaattttatatttattgttgaatgtatggtttgctacctattgtaactattattcttaatcttaaaactataaatatggatcttttatgattctttttgtaagccctaggggctctaaaatggtttcacttatttatcccaaaat

SEQ ID NO: 89 - RNA, 4084 nt, synthetic construct
  source 1..4084: mol_type = other RNA
gttccctatcactctctttaatcactactcacagtaacctcaactcctgccacaatgtttgtgttcctggtgctgctgccactggtgagctctcagtgcgtgaatctgaccacacggacccagctgcccccagcctacaccaactcttttacaaggggagtgtattaccctgacaaggtgtttagatccagcgtgctgcacagcacccaggacctgttcctgccattcttttccaatgtgacatggttccacgccatccacgtgtctggaaccaatggaaccaagagattcgacaaccccgtgctgccctttaatgatggcgtgtacttcgccagcaccgagaaaagcaatatcattcgcgggtggattttcggaaccacactggactctaagacccagagcctgctgattgtgaacaatgccaccaacgtggtgattaaggtgtgtgagtttcagttctgtaatgaccccttcctgggagtgtattaccacaagaacaataaatcctggatggaatccgagttccgcgtgtactcttccgccaacaattgcacatttgagtacgtgtcccagccttttctgatggacctggagggcaagcagggaaattttaagaatctgagagaatttgtgttcaagaacatcgacggctacttcaagatttattctaagcatacacctatcaatctggtgcgcgatctgccacaggggttcagcgccctggaacctctggtggatctgccaattggaatcaatatcacacgcttccagaccctgctggccctgcaccgctcctacctgacacccggcgattctagctctgggtggaccgccggagccgccgcctactatgtgggatacctgcagccccgcaccttcctgctgaagtataatgaaaacggcaccattaccgacgccgtggactgtgccctggacccactgagcgaaaccaagtgcacactgaaatccttcaccgtggaaaaagggatctaccagaccagcaacttccgcgtgcagcctaccgaaagcattgtgcgctttcccaatattacaaacctgtgtccatttggcgaggtgttcaacgccacacgcttcgccagcgtgtatgcctggaaccggaaaagaatcagcaactgtgtggccgattacagcgtgctgtacaatagcgcctctttttccacatttaaatgttacggggtgtcccctacaaagctgaatgacctgtgtttcaccaatgtgtatgccgacagcttcgtgattagaggcgacgaggtgcggcagatcgccccaggacagacaggcaaaattgccgattataactacaaactgccagatgactttaccgggtgcgtgatcgcctggaatagcaacaatctggacagcaaagtggggggcaattacaactatctgtacagactgtttcgcaagtctaacctgaaaccattcgagagggacattagcacagagatctatcaggccggatccacaccatgtaacggcgtggaaggctttaattgttactttcccctgcagtcctatgggtttcagccaacaaatggggtggggtatcagccctacagggtggtggtgctgtcctttgaactgctgcatgcccctgccaccgtgtgcgggcctaagaaatctaccaacctggtgaagaataaatgcgtgaatttcaatttcaatgggctgacagggacaggcgtgctgaccgaatccaataagaaatttctgccattccagcagtttgggagggacatcgccgacacaaccgacgccgtgagggatccacagaccctggaaatcctggatattacaccctgtagcttcggcggggtgtccgtgattacaccagggacaaatacatccaaccaggtggccgtgctgtatcaggacgtgaattgtaccgaagtgcccgtggccatccatgccgaccagctgacacctacctggagggtgtatagcaccggcagcaacgtgttccagacaagagccgggtgcctgattggcgccgagcacgtgaacaatagctatgaatgcgatatcccaatcggcgccgggatctgcgcctcctaccagacccagacaaattcccccagacgggccagatctgtggcctcccagtctattatcgcctataccatgtctctgggcgccgagaacagcgtggcctattctaacaattctattgccattcccacaaatttcacaattagcgtgaccacagaaatcctgcccgtgtctatgacaaagacctccgtggattgtacaatgtatatttgtggcgacagcacagagtgcagcaacctgctgctgcagtacggctctttctgcacacagctgaaccgcgccctgacaggtattgccgtggagcaggataaaaacacacaggaagtgtttgcccaggtgaagcagatttacaaaacaccacccattaaagacttcggcggattcaacttctcccagatcctgcctgaccccagcaaaccttccaagagaagctttatcgaggacctgctgtttaacaaagtgaccctggccgatgccggatttatcaaacagtacggggactgcctgggcgatattgccgccagagatctgatctgtgcccagaaattcaatgggctgaccgtgctgcctcccctgctgaccgacgagatgatcgcccagtacaccagcgccctgctggccggcacaatcacctctggctggaccttcggcgccggcgccgccctgcagatcccatttgccatgcagatggcctacagatttaatgggatcggggtgacacagaacgtgctgtatgagaatcagaagctgattgccaatcagttcaacagcgccatcgggaagattcaggacagcctgtctagcacagcctctgccctgggcaagctgcaggatgtggtgaaccagaacgcccaggccctgaataccctggtgaaacagctgtctagcaatttcggggccattagctccgtgctgaatgatatcctgagccgcctggatccacctgaggccgaagtgcagatcgacaggctgatcaccggccggctgcagagcctgcagacctatgtgacccagcagctgattagagccgccgagatccgggcctccgccaacctggccgccaccaagatgtctgaatgcgtgctgggccagtctaaacgtgtggatttttgtgggaaggggtaccatctgatgagctttccccagagcgccccccacggggtggtgttcctgcacgtgacatacgtgcctgcccaggaaaaaaattttacaaccgcccctgccatctgccacgacggaaaggcccattttccaagagagggcgtgttcgtgtctaacgggacccattggtttgtgacccagcggaacttttacgagccccagatcattaccacagataacacctttgtgagcggaaattgtgatgtggtgattggcattgtgaacaataccgtgtacgatccactgcagcctgagctggactctttcaaggaggaactggacaagtatttcaaaaatcacacatcccctgacgtggatctgggagacattagcgggattaacgcctctgtggtgaatatccagaaggagatcgaccggctgaacgaggtggccaagaatctgaatgagagcctgatcgacctgcaggaactgggaaaatacgagcagtatatcaaatggccttggtacatctggctgggcttcatcgccgggctgatcgccatcgtgatggtgacaatcatgctgtgttgcatgacctcctgctgtagctgcctgaagggctgctgttcctgcggatcttgttgcaaatttgatgaagacgattctgagcccgtgctgaaaggcgtgaaactgcactatacatagtaattaagtgcttcccacttaaaacatatcaggccttctatttatttaaatatttaaattttatatttattgttgaatgtatggtttgctacctattgtaactattattcttaatcttaaaactataaatatggatcttttatgattctttttgtaagccctaggggctctaaaatggtttcacttatttatcccaaaatttcattgc

SEQ ID NO: 90 - RNA, 4212 nt, synthetic construct
  source 1..4212: mol_type = other RNA
aggagttccctatcactctctttaatcactactcacagtaacctcaactcctgccacaatgtttgtgttcctggtgctgctgccactggtgagctctcagtgcgtgaatctgaccacacggacccagctgcccccagcctacaccaactcttttacaaggggagtgtattaccctgacaaggtgtttagatccagcgtgctgcacagcacccaggacctgttcctgccattcttttccaatgtgacatggttccacgccatccacgtgtctggaaccaatggaaccaagagattcgacaaccccgtgctgccctttaatgatggcgtgtacttcgccagcaccgagaaaagcaatatcattcgcgggtggattttcggaaccacactggactctaagacccagagcctgctgattgtgaacaatgccaccaacgtggtgattaaggtgtgtgagtttcagttctgtaatgaccccttcctgggagtgtattaccacaagaacaataaatcctggatggaatccgagttccgcgtgtactcttccgccaacaattgcacatttgagtacgtgtcccagccttttctgatggacctggagggcaagcagggaaattttaagaatctgagagaatttgtgttcaagaacatcgacggctacttcaagatttattctaagcatacacctatcaatctggtgcgcgatctgccacaggggttcagcgccctggaacctctggtggatctgccaattggaatcaatatcacacgcttccagaccctgctggccctgcaccgctcctacctgacacccggcgattctagctctgggtggaccgccggagccgccgcctactatgtgggatacctgcagccccgcaccttcctgctgaagtataatgaaaacggcaccattaccgacgccgtggactgtgccctggacccactgagcgaaaccaagtgcacactgaaatccttcaccgtggaaaaagggatctaccagaccagcaacttccgcgtgcagcctaccgaaagcattgtgcgctttcccaatattacaaacctgtgtccatttggcgaggtgttcaacgccacacgcttcgccagcgtgtatgcctggaaccggaaaagaatcagcaactgtgtggccgattacagcgtgctgtacaatagcgcctctttttccacatttaaatgttacggggtgtcccctacaaagctgaatgacctgtgtttcaccaatgtgtatgccgacagcttcgtgattagaggcgacgaggtgcggcagatcgccccaggacagacaggcaaaattgccgattataactacaaactgccagatgactttaccgggtgcgtgatcgcctggaatagcaacaatctggacagcaaagtggggggcaattacaactatctgtacagactgtttcgcaagtctaacctgaaaccattcgagagggacattagcacagagatctatcaggccggatccacaccatgtaacggcgtggaaggctttaattgttactttcccctgcagtcctatgggtttcagccaacaaatggggtggggtatcagccctacagggtggtggtgctgtcctttgaactgctgcatgcccctgccaccgtgtgcgggcctaagaaatctaccaacctggtgaagaataaatgcgtgaatttcaatttcaatgggctgacagggacaggcgtgctgaccgaatccaataagaaatttctgccattccagcagtttgggagggacatcgccgacacaaccgacgccgtgagggatccacagaccctggaaatcctggatattacaccctgtagcttcggcggggtgtccgtgattacaccagggacaaatacatccaaccaggtggccgtgctgtatcaggacgtgaattgtaccgaagtgcccgtggccatccatgccgaccagctgacacctacctggagggtgtatagcaccggcagcaacgtgttccagacaagagccgggtgcctgattggcgccgagcacgtgaacaatagctatgaatgcgatatcccaatcggcgccgggatctgcgcctcctaccagacccagacaaattcccccagacgggccagatctgtggcctcccagtctattatcgcctataccatgtctctgggcgccgagaacagcgtggcctattctaacaattctattgccattcccacaaatttcacaattagcgtgaccacagaaatcctgcccgtgtctatgacaaagacctccgtggattgtacaatgtatatttgtggcgacagcacagagtgcagcaacctgctgctgcagtacggctctttctgcacacagctgaaccgcgccctgacaggtattgccgtggagcaggataaaaacacacaggaagtgtttgcccaggtgaagcagatttacaaaacaccacccattaaagacttcggcggattcaacttctcccagatcctgcctgaccccagcaaaccttccaagagaagctttatcgaggacctgctgtttaacaaagtgaccctggccgatgccggatttatcaaacagtacggggactgcctgggcgatattgccgccagagatctgatctgtgcccagaaattcaatgggctgaccgtgctgcctcccctgctgaccgacgagatgatcgcccagtacaccagcgccctgctggccggcacaatcacctctggctggaccttcggcgccggcgccgccctgcagatcccatttgccatgcagatggcctacagatttaatgggatcggggtgacacagaacgtgctgtatgagaatcagaagctgattgccaatcagttcaacagcgccatcgggaagattcaggacagcctgtctagcacagcctctgccctgggcaagctgcaggatgtggtgaaccagaacgcccaggccctgaataccctggtgaaacagctgtctagcaatttcggggccattagctccgtgctgaatgatatcctgagccgcctggatccacctgaggccgaagtgcagatcgacaggctgatcaccggccggctgcagagcctgcagacctatgtgacccagcagctgattagagccgccgagatccgggcctccgccaacctggccgccaccaagatgtctgaatgcgtgctgggccagtctaaacgtgtggatttttgtgggaaggggtaccatctgatgagctttccccagagcgccccccacggggtggtgttcctgcacgtgacatacgtgcctgcccaggaaaaaaattttacaaccgcccctgccatctgccacgacggaaaggcccattttccaagagagggcgtgttcgtgtctaacgggacccattggtttgtgacccagcggaacttttacgagccccagatcattaccacagataacacctttgtgagcggaaattgtgatgtggtgattggcattgtgaacaataccgtgtacgatccactgcagcctgagctggactctttcaaggaggaactggacaagtatttcaaaaatcacacatcccctgacgtggatctgggagacattagcgggattaacgcctctgtggtgaatatccagaaggagatcgaccggctgaacgaggtggccaagaatctgaatgagagcctgatcgacctgcaggaactgggaaaatacgagcagtatatcaaatggccttggtacatctggctgggcttcatcgccgggctgatcgccatcgtgatggtgacaatcatgctgtgttgcatgacctcctgctgtagctgcctgaagggctgctgttcctgcggatcttgttgcaaatttgatgaagacgattctgagcccgtgctgaaaggcgtgaaactgcactatacatagtaattaagtgcttcccacttaaaacatatcaggccttctatttatttaaatatttaaattttatatttattgttgaatgtatggtttgctacctattgtaactattattcttaatcttaaaactataaatatggatcttttatgattctttttgtaagccctaggggctctaaaatggtttcacttatttatcccaaaatttcattgcaaaaaaaaaaaaaaaaaaaaaaaaaaaaaagcatatgactaaaaaaaaaaaaaaaaaaaaaaaaaaaaaaaaaaaaaaaaaaaaaaaaaaaaaaaaaaaaaaaaaaaaaaaaaaaaaaaaaaaa

SEQ ID NO: 91 - RNA, 4024 nt, synthetic construct
  source 1..4024: mol_type = other RNA
ggggaaataagagagaaaagaagagtaagaagaaatataagaccccggcgccgccaccatgtttgtttttcttgttcttctgccattggtgtcttcccaatgtgtgaacttgactacccgcacacagctcccgccggcgtacactaactccttcacccggggggtttactacccggacaaagtgttccgcagcagtgtcctgcattcaacacaagatttgttccttccattctttagcaatgtcacttggttccatgctatacacgtgagtggcactaacggcactaagcgcttcgataacccggttctgccgtttaatgatggcgtttacttcgcaagtactgagaaatcaaacattatacgggggtggatattcggtactacattggatagtaaaactcaaagccttttgattgtcaacaatgcaactaatgtagtcataaaagtttgtgaattccaattctgtaacgatccctttcttggtgtgtattaccacaagaataacaaatcatggatggagtctgaatttcgagtatacagtagcgccaataattgcacgtttgagtatgtaagccagccgtttctgatggacttggaaggaaagcaaggcaactttaagaacctcagggagttcgtattcaaaaatatagacggttacttcaagatttactcaaaacatacacctatcaacttggtccgagatctcccacaaggtttttcagcgctcgagccattggtggacctgcccatcggaatcaacattacccgattccagacactgcttgcactgcaccggagttatctcacacccggcgacagctcgtctggttggacggcgggagctgccgcttactatgtcggttacttgcaacctcggacatttcttctgaagtataacgaaaacggtacgatcaccgatgccgtagactgcgctctcgatcccctttcagagacgaagtgcacgctcaaatcatttactgtggaaaaaggaatttatcaaacgagcaatttcagggtgcaacccacggagtccatcgtacgattcccaaacataacaaatctttgcccgtttggcgaggtttttaatgctacgcgctttgcatcagtgtacgcttggaataggaaacgaatctcaaattgtgttgcggattattccgtgttgtataattccgcaagcttctccacctttaaatgttatggcgtgtcccccacaaaacttaacgatctttgctttacaaatgtctatgcggattcattcgttatccgaggggatgaagtgcgacaaatcgctcctgggcagacagggaagatagctgattacaattacaaacttccagacgattttacaggatgtgtaatcgcgtggaactcaaacaatttggacagtaaggttggtggcaactacaattatctgtatagacttttcagaaaaagtaacctcaaacctttcgaacgcgacattagcactgagatataccaggccggatcaactccttgtaacggtgttgaaggtttcaactgttactttccgctccaatcctacggctttcaaccaacgaacggtgtcgggtaccaaccatacagagttgtcgtcttgagttttgagcttttgcacgcacctgcaaccgtgtgtggtccgaagaaaagtactaatctggttaaaaataaatgcgtcaatttcaactttaatgggttgacgggcacaggcgtgctgacagagtccaataaaaagtttttgccctttcagcagtttgggagggacatcgccgatacgaccgatgccgtccgagatcctcaaacccttgaaatattggacattaccccctgtagttttggcggtgtaagtgtgattactcccggaacgaatacatctaaccaggtagcggtgctttatcaagatgtcaactgtacagaggtccccgtggcgattcacgccgatcagttgacacccacatggagggtttacagcacaggatccaacgtcttccagacgagagcaggatgcttgatcggtgccgagcatgtgaataacagctacgaatgtgacattccgattggtgctggaatctgcgcaagttaccaaactcaaacgaattcccctggctccgcctcctctgtggcatcccagtctataatcgcgtatacgatgtcactgggcgccgagaattctgtcgcatatagcaacaactccatcgcaatacccacaaattttacaatttctgtgaccacggaaattctgcccgtcagcatgacaaaaactagcgtggactgcacgatgtatatctgcggcgactccacagagtgttccaacctcctcttgcaatatggcagcttttgcacacaattgaaccgagcgctcaccgggatagcggtcgagcaagataagaatacccaagaggtgtttgcccaggtgaagcaaatctataagacccctccaataaaggattttggcggcttcaatttctcacaaattttgcccgatccatctaagccgtccaagcgatcatttattgaggatctgctgttcaacaaagtcactctcgccgacgcggggtttattaaacaatatggcgattgcctgggcgacatcgccgccagggaccttatatgcgcccagaagttcaacggtctcaccgtgctgccaccattgttgactgacgaaatgatcgcacagtatacgtcagcgctgctggctggtaccattacttctggctggacattcggagccggtgcagcccttcagattccatttgcaatgcagatggcctatagatttaatggaataggagtgacgcagaacgtattgtacgagaatcaaaagttgatcgcaaaccagttcaattctgccattggaaagatacaagattccctttcttctaccgcctcagccctgggtaagttgcaagatgtcgtcaaccaaaatgcacaggctttgaataccttggtaaaacaattgtcatccaatttcggcgccataagctcagtacttaacgatatcttgtcacgattggatccccccgaagccgaggtccaaatcgataggctcatcacgggacggctccagagccttcaaacctatgtgacgcaacaactgatacgggccgcagaaatccgagcgtccgccaacttggcagctaccaagatgtccgaatgtgtactgggtcaatcaaagagagttgatttctgtggaaaaggataccatctcatgtcattcccccaaagcgccccgcacggcgtcgtgttcctccatgtgacttacgttccagcacaagaaaaaaacttcacaactgcgcccgctatctgccatgacgggaaggcgcacttcccacgagagggtgtatttgtgtcaaatggaacgcactggttcgtaacgcaaaggaacttctatgaaccgcagataatcacgactgacaacacttttgtatctggcaattgtgatgtggtcatcgggatagttaacaacactgtctatgacccgctgcaacccgagcttgattcatttaaagaagaactcgataaatatttcaagaatcacaccagtcccgatgtggaccttggagacatttccgggataaatgcctctgtggtaaacatccaaaaggaaatcgatcggctgaatgaagtggccaaaaacttgaacgaaagtctgatagaccttcaggagctcgggaagtatgaacaatacataaagtggccatggtacatctggcttgggttcatcgctggcctcatagccatcgttatggttaccatcatgctctgctgtatgacttcctgttgttcctgtctcaaagggtgttgcagctgtggtagctgctgcaaatttgacgaggatgactcagaacccgtcttgaagggagtcaagttgcactacacttagtaatctagacggcgcgcccacccagcggccgctgataataggctggagcctcggtggccatgcttcttgccccttgggcctccccccagcccctcctccccttcctgcacccgtacccccgtggtctttgaataaagtctgatt

SEQ ID NO: 92 - RNA, 4157 nt, synthetic construct
  source 1..4157: mol_type = other RNA
aggggaaataagagagaaaagaagagtaagaagaaatataagaccccggcgccgccaccatgtttgtttttcttgttcttctgccattggtgtcttcccaatgtgtgaacttgactacccgcacacagctcccgccggcgtacactaactccttcacccggggggtttactacccggacaaagtgttccgcagcagtgtcctgcattcaacacaagatttgttccttccattctttagcaatgtcacttggttccatgctatacacgtgagtggcactaacggcactaagcgcttcgataacccggttctgccgtttaatgatggcgtttacttcgcaagtactgagaaatcaaacattatacgggggtggatattcggtactacattggatagtaaaactcaaagccttttgattgtcaacaatgcaactaatgtagtcataaaagtttgtgaattccaattctgtaacgatccctttcttggtgtgtattaccacaagaataacaaatcatggatggagtctgaatttcgagtatacagtagcgccaataattgcacgtttgagtatgtaagccagccgtttctgatggacttggaaggaaagcaaggcaactttaagaacctcagggagttcgtattcaaaaatatagacggttacttcaagatttactcaaaacatacacctatcaacttggtccgagatctcccacaaggtttttcagcgctcgagccattggtggacctgcccatcggaatcaacattacccgattccagacactgcttgcactgcaccggagttatctcacacccggcgacagctcgtctggttggacggcgggagctgccgcttactatgtcggttacttgcaacctcggacatttcttctgaagtataacgaaaacggtacgatcaccgatgccgtagactgcgctctcgatcccctttcagagacgaagtgcacgctcaaatcatttactgtggaaaaaggaatttatcaaacgagcaatttcagggtgcaacccacggagtccatcgtacgattcccaaacataacaaatctttgcccgtttggcgaggtttttaatgctacgcgctttgcatcagtgtacgcttggaataggaaacgaatctcaaattgtgttgcggattattccgtgttgtataattccgcaagcttctccacctttaaatgttatggcgtgtcccccacaaaacttaacgatctttgctttacaaatgtctatgcggattcattcgttatccgaggggatgaagtgcgacaaatcgctcctgggcagacagggaagatagctgattacaattacaaacttccagacgattttacaggatgtgtaatcgcgtggaactcaaacaatttggacagtaaggttggtggcaactacaattatctgtatagacttttcagaaaaagtaacctcaaacctttcgaacgcgacattagcactgagatataccaggccggatcaactccttgtaacggtgttgaaggtttcaactgttactttccgctccaatcctacggctttcaaccaacgaacggtgtcgggtaccaaccatacagagttgtcgtcttgagttttgagcttttgcacgcacctgcaaccgtgtgtggtccgaagaaaagtactaatctggttaaaaataaatgcgtcaatttcaactttaatgggttgacgggcacaggcgtgctgacagagtccaataaaaagtttttgccctttcagcagtttgggagggacatcgccgatacgaccgatgccgtccgagatcctcaaacccttgaaatattggacattaccccctgtagttttggcggtgtaagtgtgattactcccggaacgaatacatctaaccaggtagcggtgctttatcaagatgtcaactgtacagaggtccccgtggcgattcacgccgatcagttgacacccacatggagggtttacagcacaggatccaacgtcttccagacgagagcaggatgcttgatcggtgccgagcatgtgaataacagctacgaatgtgacattccgattggtgctggaatctgcgcaagttaccaaactcaaacgaattcccctggctccgcctcctctgtggcatcccagtctataatcgcgtatacgatgtcactgggcgccgagaattctgtcgcatatagcaacaactccatcgcaatacccacaaattttacaatttctgtgaccacggaaattctgcccgtcagcatgacaaaaactagcgtggactgcacgatgtatatctgcggcgactccacagagtgttccaacctcctcttgcaatatggcagcttttgcacacaattgaaccgagcgctcaccgggatagcggtcgagcaagataagaatacccaagaggtgtttgcccaggtgaagcaaatctataagacccctccaataaaggattttggcggcttcaatttctcacaaattttgcccgatccatctaagccgtccaagcgatcatttattgaggatctgctgttcaacaaagtcactctcgccgacgcggggtttattaaacaatatggcgattgcctgggcgacatcgccgccagggaccttatatgcgcccagaagttcaacggtctcaccgtgctgccaccattgttgactgacgaaatgatcgcacagtatacgtcagcgctgctggctggtaccattacttctggctggacattcggagccggtgcagcccttcagattccatttgcaatgcagatggcctatagatttaatggaataggagtgacgcagaacgtattgtacgagaatcaaaagttgatcgcaaaccagttcaattctgccattggaaagatacaagattccctttcttctaccgcctcagccctgggtaagttgcaagatgtcgtcaaccaaaatgcacaggctttgaataccttggtaaaacaattgtcatccaatttcggcgccataagctcagtacttaacgatatcttgtcacgattggatccccccgaagccgaggtccaaatcgataggctcatcacgggacggctccagagccttcaaacctatgtgacgcaacaactgatacgggccgcagaaatccgagcgtccgccaacttggcagctaccaagatgtccgaatgtgtactgggtcaatcaaagagagttgatttctgtggaaaaggataccatctcatgtcattcccccaaagcgccccgcacggcgtcgtgttcctccatgtgacttacgttccagcacaagaaaaaaacttcacaactgcgcccgctatctgccatgacgggaaggcgcacttcccacgagagggtgtatttgtgtcaaatggaacgcactggttcgtaacgcaaaggaacttctatgaaccgcagataatcacgactgacaacacttttgtatctggcaattgtgatgtggtcatcgggatagttaacaacactgtctatgacccgctgcaacccgagcttgattcatttaaagaagaactcgataaatatttcaagaatcacaccagtcccgatgtggaccttggagacatttccgggataaatgcctctgtggtaaacatccaaaaggaaatcgatcggctgaatgaagtggccaaaaacttgaacgaaagtctgatagaccttcaggagctcgggaagtatgaacaatacataaagtggccatggtacatctggcttgggttcatcgctggcctcatagccatcgttatggttaccatcatgctctgctgtatgacttcctgttgttcctgtctcaaagggtgttgcagctgtggtagctgctgcaaatttgacgaggatgactcagaacccgtcttgaagggagtcaagttgcactacacttagtaatctagacggcgcgcccacccagcggccgctgataataggctggagcctcggtggccatgcttcttgccccttgggcctccccccagcccctcctccccttcctgcacccgtacccccgtggtctttgaataaagtctgattttcattgcaaaaaaaaaaaaaaaaaaaaaaaaaaaaaagcatatgactaaaaaaaaaaaaaaaaaaaaaaaaaaaaaaaaaaaaaaaaaaaaaaaaaaaaaaaaaaaaaaaaaaaaaaaaaaaaaaaaaaaa

SEQ ID NO: 93 - RNA, 4165 nt, synthetic construct
  source 1..4165: mol_type = other RNA
gagaataaactagtattcttctggtccccacagactcagagagaacccgccaccatgttcgtgttcctggtgctgctgcccctggtgagcagccagtgcgtgaacctgaccaccaggacccagctgccccccgcctacaccaacagcttcacccggggcgtgtactaccccgacaaggtgttcaggagcagcgtgctgcacagcacccaggacctgttcctgcccttcttcagcaacgtgacctggttccacgtgatcagcggcaccaacggcaccaagcggttcgacaaccccgtgctgcccttcaacgacggcgtgtacttcgccagcatcgagaaaagcaacatcatccggggctggatcttcggcaccaccctggacagcaagacccagagcctgctgatcgtgaacaacgccaccaacgtggtgatcaaggtgtgcgagttccagttctgcaacgaccccttcctggaccacaagaacaacaagagctggatggagagcgagttccgggtgtacagcagcgccaacaactgcaccttcgagtacgtgagccagcccttcctgatggacctggagggcaagcagggcaacttcaagaacctgcgggagttcgtgttcaagaacatcgacggctacttcaagatctacagcaagcacacccccatcatcgtgagggagcccgaggacctgccccagggcttcagcgccctggagcccctggtggacctgcccatcggcatcaacatcaccaggttccagaccctgctggccctgcatcggagctacctgacccccggcgatagtagcagcggctggaccgccggcgctgccgcctattacgtgggctacctgcagcccaggaccttcctactgaagtacaacgagaacggcaccatcaccgacgccgtggactgcgccctggaccccctgagcgagaccaagtgcaccctgaaaagcttcaccgtggagaagggcatctaccagaccagcaacttcagggtgcagcccaccgagagcatcgtgaggttccccaacatcaccaacctgtgccccttcgacgaggtgttcaacgccacccggttcgccagcgtgtacgcctggaaccggaagcggatcagcaactgcgtggccgactacagcgtgctgtacaacctggcccccttcttcaccttcaagtgctacggcgtgagccccaccaagctgaacgacctgtgcttcaccaacgtgtacgccgacagcttcgtgatcaggggcgacgaggtgcggcagatcgcccccggccagaccggcaacatcgccgactacaactacaagctgcccgacgacttcaccggctgcgtgatcgcctggaacagcaacaagctggacagcaaggtgagcggcaactacaactacctgtaccggctgttcaggaaaagcaacctgaagcccttcgagagggacatcagcaccgagatctaccaggccggcaacaagccctgcaacggcgtggccggcttcaactgctacttccccctgcggagctacagcttccggcccacctacggcgtgggccaccaaccctaccgggtggtggttctgagcttcgaactgctgcacgcccccgccaccgtgtgcggccccaagaaaagcaccaatctggtgaagaacaagtgcgtgaacttcaacttcaacggcctgaagggcaccggcgtgctgaccgagagcaacaagaagttcctgcccttccagcagttcggcagggacatcgccgacaccaccgacgccgtgcgggacccccagaccctggagatcctggacatcaccccctgcagcttcggcggcgtgagcgtgattacccctggcaccaacaccagcaaccaggtggccgtgctgtaccagggcgtgaactgcaccgaggtgcccgtggccatccacgcggaccagctgacccccacttggcgggtgtatagcaccggcagcaacgtgttccaaacccgggccggctgcctgatcggagccgagtatgtgaacaacagctacgagtgcgacatccccatcggcgccggcatctgcgccagctaccagacccagaccaagagccaccggagggcccggagcgtggccagccagagcatcatcgcctacaccatgagcctgggcgccgagaacagcgtggcctacagcaacaacagcatcgccatccccaccaacttcaccatcagcgtgaccaccgagatcctgcccgtgagcatgaccaagaccagcgtggactgcaccatgtacatctgcggcgacagcaccgagtgcagcaacctgctgctgcagtacggcagcttctgcacccagctgaagcgcgccctgaccggcatcgccgtggagcaggacaagaacacccaggaggtgttcgcccaggtgaagcagatctacaagaccccccccatcaagtacttcggcggcttcaacttcagccagatcctgcccgaccccagcaagcccagcaagcggagcttcatcgaggacctgctgttcaacaaggtgaccctggccgacgccggcttcatcaagcagtacggcgactgcctgggcgacatcgccgcccgggacctgatctgcgcccagaagttcaagggcctgaccgtgctgccccctctgctgaccgacgaaatgatcgcccagtacaccagtgccctgctggccggcaccataaccagcggatggaccttcggcgccggcgccgcccttcagatccccttcgccatgcagatggcctaccggttcaacggcatcggcgtgacccagaacgtgctgtacgagaaccagaagctgatcgccaaccagttcaacagcgccatcggcaagatccaggacagcctgagcagcaccgccagcgccctgggcaagctgcaggacgtggtgaaccacaacgcccaggccctgaacaccctggtgaagcagctgagcagcaagttcggcgccatcagcagcgtgctgaacgacatcttcagccggctggacccccccgaggccgaggtgcagatcgacaggctgatcactggtcggctgcagagcctgcagacctacgtgacccagcaactgatccgggccgccgagatccgcgccagcgccaacctagccgccaccaagatgagcgagtgcgtgctgggccagagcaagcgggtggacttctgcggaaaaggctaccacctgatgagcttcccccagagcgccccacacggcgtggtgttcctgcacgtgacctacgtgcccgcccaggagaagaacttcaccaccgcccccgccatctgccacgacggcaaggcccacttcccccgggagggcgtgttcgtgagcaacggcacccactggttcgtgacccagcggaacttctacgagccccagatcatcaccaccgacaacaccttcgtgagcggcaactgcgacgtggtgatcggcatcgtgaacaacaccgtgtacgaccccctgcagcccgagctggacagcttcaaggaggagctggacaagtacttcaagaaccacaccagccccgacgtggacctgggcgacatcagcggcatcaacgccagcgtggtgaacatccagaaggagatcgaccggctgaacgaggtggccaagaacctgaacgagagcctgatcgacctgcaggagctgggcaagtacgagcagtacatcaagtggccctggtacatctggctgggcttcatcgccggcctgatcgccatcgtgatggtgaccatcatgctgtgctgcatgaccagctgctgcagctgcctgaagggctgctgcagctgcggcagctgctgcaagttcgacgaggacgacagcgagcccgtgctgaagggcgtgaagctgcactacacctgataactcgagctggtactgcatgcacacaatgctagctgcccctttcccgtcctgggtaccccgagtctcccccgacctcgggtcccaggtatgctcccacctccacctgccccactcaccacctctgctagttccagacacctcccaagcacgcaacaatgcagctcaaaacgcttagcctagccacacccccacgggaaacagcagtgattaacctttagcaataaacgaaagtttaactaagctatactaaccccagggttggtcaatttcgtgccagccacaccctggagctagc

SEQ ID NO: 94 - RNA, 4298 nt, synthetic construct
  source 1..4298: mol_type = other RNA
agagaataaactagtattcttctggtccccacagactcagagagaacccgccaccatgttcgtgttcctggtgctgctgcccctggtgagcagccagtgcgtgaacctgaccaccaggacccagctgccccccgcctacaccaacagcttcacccggggcgtgtactaccccgacaaggtgttcaggagcagcgtgctgcacagcacccaggacctgttcctgcccttcttcagcaacgtgacctggttccacgtgatcagcggcaccaacggcaccaagcggttcgacaaccccgtgctgcccttcaacgacggcgtgtacttcgccagcatcgagaaaagcaacatcatccggggctggatcttcggcaccaccctggacagcaagacccagagcctgctgatcgtgaacaacgccaccaacgtggtgatcaaggtgtgcgagttccagttctgcaacgaccccttcctggaccacaagaacaacaagagctggatggagagcgagttccgggtgtacagcagcgccaacaactgcaccttcgagtacgtgagccagcccttcctgatggacctggagggcaagcagggcaacttcaagaacctgcgggagttcgtgttcaagaacatcgacggctacttcaagatctacagcaagcacacccccatcatcgtgagggagcccgaggacctgccccagggcttcagcgccctggagcccctggtggacctgcccatcggcatcaacatcaccaggttccagaccctgctggccctgcatcggagctacctgacccccggcgatagtagcagcggctggaccgccggcgctgccgcctattacgtgggctacctgcagcccaggaccttcctactgaagtacaacgagaacggcaccatcaccgacgccgtggactgcgccctggaccccctgagcgagaccaagtgcaccctgaaaagcttcaccgtggagaagggcatctaccagaccagcaacttcagggtgcagcccaccgagagcatcgtgaggttccccaacatcaccaacctgtgccccttcgacgaggtgttcaacgccacccggttcgccagcgtgtacgcctggaaccggaagcggatcagcaactgcgtggccgactacagcgtgctgtacaacctggcccccttcttcaccttcaagtgctacggcgtgagccccaccaagctgaacgacctgtgcttcaccaacgtgtacgccgacagcttcgtgatcaggggcgacgaggtgcggcagatcgcccccggccagaccggcaacatcgccgactacaactacaagctgcccgacgacttcaccggctgcgtgatcgcctggaacagcaacaagctggacagcaaggtgagcggcaactacaactacctgtaccggctgttcaggaaaagcaacctgaagcccttcgagagggacatcagcaccgagatctaccaggccggcaacaagccctgcaacggcgtggccggcttcaactgctacttccccctgcggagctacagcttccggcccacctacggcgtgggccaccaaccctaccgggtggtggttctgagcttcgaactgctgcacgcccccgccaccgtgtgcggccccaagaaaagcaccaatctggtgaagaacaagtgcgtgaacttcaacttcaacggcctgaagggcaccggcgtgctgaccgagagcaacaagaagttcctgcccttccagcagttcggcagggacatcgccgacaccaccgacgccgtgcgggacccccagaccctggagatcctggacatcaccccctgcagcttcggcggcgtgagcgtgattacccctggcaccaacaccagcaaccaggtggccgtgctgtaccagggcgtgaactgcaccgaggtgcccgtggccatccacgcggaccagctgacccccacttggcgggtgtatagcaccggcagcaacgtgttccaaacccgggccggctgcctgatcggagccgagtatgtgaacaacagctacgagtgcgacatccccatcggcgccggcatctgcgccagctaccagacccagaccaagagccaccggagggcccggagcgtggccagccagagcatcatcgcctacaccatgagcctgggcgccgagaacagcgtggcctacagcaacaacagcatcgccatccccaccaacttcaccatcagcgtgaccaccgagatcctgcccgtgagcatgaccaagaccagcgtggactgcaccatgtacatctgcggcgacagcaccgagtgcagcaacctgctgctgcagtacggcagcttctgcacccagctgaagcgcgccctgaccggcatcgccgtggagcaggacaagaacacccaggaggtgttcgcccaggtgaagcagatctacaagaccccccccatcaagtacttcggcggcttcaacttcagccagatcctgcccgaccccagcaagcccagcaagcggagcttcatcgaggacctgctgttcaacaaggtgaccctggccgacgccggcttcatcaagcagtacggcgactgcctgggcgacatcgccgcccgggacctgatctgcgcccagaagttcaagggcctgaccgtgctgccccctctgctgaccgacgaaatgatcgcccagtacaccagtgccctgctggccggcaccataaccagcggatggaccttcggcgccggcgccgcccttcagatccccttcgccatgcagatggcctaccggttcaacggcatcggcgtgacccagaacgtgctgtacgagaaccagaagctgatcgccaaccagttcaacagcgccatcggcaagatccaggacagcctgagcagcaccgccagcgccctgggcaagctgcaggacgtggtgaaccacaacgcccaggccctgaacaccctggtgaagcagctgagcagcaagttcggcgccatcagcagcgtgctgaacgacatcttcagccggctggacccccccgaggccgaggtgcagatcgacaggctgatcactggtcggctgcagagcctgcagacctacgtgacccagcaactgatccgggccgccgagatccgcgccagcgccaacctagccgccaccaagatgagcgagtgcgtgctgggccagagcaagcgggtggacttctgcggaaaaggctaccacctgatgagcttcccccagagcgccccacacggcgtggtgttcctgcacgtgacctacgtgcccgcccaggagaagaacttcaccaccgcccccgccatctgccacgacggcaaggcccacttcccccgggagggcgtgttcgtgagcaacggcacccactggttcgtgacccagcggaacttctacgagccccagatcatcaccaccgacaacaccttcgtgagcggcaactgcgacgtggtgatcggcatcgtgaacaacaccgtgtacgaccccctgcagcccgagctggacagcttcaaggaggagctggacaagtacttcaagaaccacaccagccccgacgtggacctgggcgacatcagcggcatcaacgccagcgtggtgaacatccagaaggagatcgaccggctgaacgaggtggccaagaacctgaacgagagcctgatcgacctgcaggagctgggcaagtacgagcagtacatcaagtggccctggtacatctggctgggcttcatcgccggcctgatcgccatcgtgatggtgaccatcatgctgtgctgcatgaccagctgctgcagctgcctgaagggctgctgcagctgcggcagctgctgcaagttcgacgaggacgacagcgagcccgtgctgaagggcgtgaagctgcactacacctgataactcgagctggtactgcatgcacacaatgctagctgcccctttcccgtcctgggtaccccgagtctcccccgacctcgggtcccaggtatgctcccacctccacctgccccactcaccacctctgctagttccagacacctcccaagcacgcaacaatgcagctcaaaacgcttagcctagccacacccccacgggaaacagcagtgattaacctttagcaataaacgaaagtttaactaagctatactaaccccagggttggtcaatttcgtgccagccacaccctggagctagcttcattgcaaaaaaaaaaaaaaaaaaaaaaaaaaaaaagcatatgactaaaaaaaaaaaaaaaaaaaaaaaaaaaaaaaaaaaaaaaaaaaaaaaaaaaaaaaaaaaaaaaaaaaaaaaaaaaaaaaaaaaa

SEQ ID NO: 95 - RNA, 4007 nt, synthetic construct
  source 1..4007: mol_type = other RNA
gattccccgcctcctcctgtcccgcagtcggcgtccagcggctctgcttgttcgtgtgtgtgtcgttgcaggccttattcatgttcgtgttcctggtcctcctgcccctggtgagctcccagtgcgtgaacctcaccacccgcacgcagctgccgcccgcctacaccaacagcttcacccggggcgtctactaccccgacaaggtgttccgctccagcgtgctgcactccacccaggacctcttcctgcccttcttcagcaacgtcacgtggttccacgccatccacgtgtccgggaccaacggcaccaagcggttcgacaacccggtgctgcccttcaacgacggggtctacttcgcgagcaccgagaagtccaacatcatccgcggctggatcttcgggacgaccctcgacagcaagacccagtccctgctgatcgtgaacaacgccaccaacgtggtcatcaaggtgtgcgagttccagttctgcaacgaccccttcctcggcgtgtactaccacaagaacaacaagagctggatggagtccgagttccgggtctacagctccgccaacaactgcacgttcgagtacgtgagccagcccttcctgatggacctggagggcaagcaggggaacttcaagaacctccgcgagttcgtgttcaagaacatcgacggctacttcaagatctactccaagcacaccccgatcaacctggtccgggacctgccccaggggttcagcgccctcgagcccctggtggacctgcccatcggcatcaacatcacccgcttccagaccctcctggccctgcaccggtcctacctcacgccgggggacagcagctccggctggaccgcgggcgccgccgcctactacgtggggtacctgcagccccgcaccttcctgctcaagtacaacgagaacggcaccatcacggacgcggtcgactgcgccctggaccccctgagcgagaccaagtgcaccctcaagtccttcaccgtggagaaggggatctaccagacgagcaacttccgggtgcagcccaccgagtccatcgtccgcttcccgaacatcaccaacctgtgccccttcggcgaggtgttcaacgccacccggttcgccagcgtctacgcctggaaccgcaagcggatctccaactgcgtggcggactacagcgtgctgtacaactccgccagcttctccacgttcaagtgctacggcgtcagccccaccaagctcaacgacctgtgcttcaccaacgtgtacgccgactccttcgtgatccgcggggacgaggtccggcagatcgcccccggccagaccgggaagatcgccgactacaactacaagctgccggacgacttcacgggctgcgtgatcgcgtggaacagcaacaacctcgactccaaggtcgggggcaactacaactacctgtaccgcctgttccgcaagagcaacctcaagcccttcgagcgggacatctccaccgagatctaccaggccggcagcaccccctgcaacggggtggagggcttcaactgctacttccccctgcagtcctacgggttccagccgaccaacggcgtggggtaccagccctaccgggtggtcgtgctgagcttcgagctcctgcacgcccccgccacggtgtgcggccccaagaagtccaccaacctggtcaagaacaagtgcgtgaacttcaacttcaacggcctcaccgggaccggcgtgctgaccgagagcaacaagaagttcctgccgttccagcagttcgggcgcgacatcgccgacacgaccgacgcggtccgcgacccccagaccctggagatcctcgacatcaccccctgcagcttcggcggggtgtccgtgatcacgccgggcaccaacaccagcaaccaggtcgccgtgctgtaccaggacgtgaactgcaccgaggtccccgtggccatccacgccgaccagctgacgcccacctggcgggtgtactccaccggcagcaacgtcttccagacccgcgccgggtgcctcatcggcgcggagcacgtgaacaactcctacgagtgcgacatccccatcggggccggcatctgcgccagctaccagacgcagaccaactccccgcggcgcgcccggagcgtggcgtcccagagcatcatcgcctacaccatgtccctgggcgccgagaacagcgtcgcctactccaacaacagcatcgccatccccaccaacttcacgatctccgtgaccaccgagatcctgcccgtgagcatgaccaagacgagcgtcgactgcaccatgtacatctgcggggactccaccgagtgcagcaacctcctgctgcagtacggctccttctgcacccagctcaaccgcgcgctgacggggatcgccgtggagcaggacaagaacacccaggaggtgttcgcccaggtcaagcagatctacaagacgcccccgatcaaggacttcggcgggttcaacttcagccagatcctgcccgacccctccaagcccagcaagcggtccttcatcgaggacctcctgttcaacaaggtgaccctggccgacgccggcttcatcaagcagtacggcgactgcctcggggacatcgcggcccgcgacctgatctgcgcccagaagttcaacggcctgaccgtgctcccgcccctgctgaccgacgagatgatcgcccagtacaccagcgccctcctggcggggaccatcacgtccggctggaccttcggggccggcgccgccctgcagatccccttcgcgatgcagatggcctaccggttcaacggcatcggggtcacccagaacgtgctctacgagaaccagaagctgatcgccaaccagttcaacagcgccatcggcaagatccaggactccctgagctccaccgccagcgcgctcgggaagctgcaggacgtggtcaaccagaacgcccaggccctgaacacgctcgtgaagcagctgtccagcaacttcggcgccatctccagcgtgctgaacgacatcctctcccgcctggacccgcccgaggccgaggtgcagatcgaccggctgatcaccgggcgcctccagagcctgcagacctacgtgacccagcagctgatccgggcggccgagatccgcgccagcgccaacctcgccgcgaccaagatgtccgagtgcgtcctgggccagagcaagcgggtggacttctgcggcaaggggtaccacctgatgtccttcccccagagcgccccgcacggcgtggtcttcctccacgtgacgtacgtccccgcccaggagaagaacttcaccaccgcccccgcgatctgccacgacgggaaggcccacttcccccgcgagggcgtgttcgtgtccaacgggacccactggttcgtcacgcagcggaacttctacgagccgcagatcatcaccaccgacaacaccttcgtgagcggcaactgcgacgtggtcatcggcatcgtgaacaacacggtgtacgaccccctgcagcccgagctggactccttcaaggaggagctcgacaagtacttcaagaaccacaccagccccgacgtcgacctgggggacatctccggcatcaacgccagcgtggtgaacatccagaaggagatcgaccgcctgaacgaggtcgccaagaacctcaacgagtccctgatcgacctgcaggagctcgggaagtacgagcagtacatcaagtggccgtggtacatctggctgggcttcatcgccggcctgatcgcgatcgtgatggtgaccatcatgctctgctgcatgaccagctgctgctcctgcctgaaggggtgctgcagctgcggctcctgctgcaagttcgacgaggacgacagcgagcccgtcctgaagggggtgaagctccactacacgtgaggactagttataagactgactagccctgttcccagagcccacttttttttctttttttgaaataaaatagcctgtctttcacaaaggctcttttcagagccacct

SEQ ID NO: 96 - RNA, 4104 nt, synthetic construct
  source 1..4104: mol_type = other RNA
agattccccgcctcctcctgtcccgcagtcggcgtccagcggctctgcttgttcgtgtgtgtgtcgttgcaggccttattcatgttcgtgttcctggtcctcctgcccctggtgagctcccagtgcgtgaacctcaccacccgcacgcagctgccgcccgcctacaccaacagcttcacccggggcgtctactaccccgacaaggtgttccgctccagcgtgctgcactccacccaggacctcttcctgcccttcttcagcaacgtcacgtggttccacgccatccacgtgtccgggaccaacggcaccaagcggttcgacaacccggtgctgcccttcaacgacggggtctacttcgcgagcaccgagaagtccaacatcatccgcggctggatcttcgggacgaccctcgacagcaagacccagtccctgctgatcgtgaacaacgccaccaacgtggtcatcaaggtgtgcgagttccagttctgcaacgaccccttcctcggcgtgtactaccacaagaacaacaagagctggatggagtccgagttccgggtctacagctccgccaacaactgcacgttcgagtacgtgagccagcccttcctgatggacctggagggcaagcaggggaacttcaagaacctccgcgagttcgtgttcaagaacatcgacggctacttcaagatctactccaagcacaccccgatcaacctggtccgggacctgccccaggggttcagcgccctcgagcccctggtggacctgcccatcggcatcaacatcacccgcttccagaccctcctggccctgcaccggtcctacctcacgccgggggacagcagctccggctggaccgcgggcgccgccgcctactacgtggggtacctgcagccccgcaccttcctgctcaagtacaacgagaacggcaccatcacggacgcggtcgactgcgccctggaccccctgagcgagaccaagtgcaccctcaagtccttcaccgtggagaaggggatctaccagacgagcaacttccgggtgcagcccaccgagtccatcgtccgcttcccgaacatcaccaacctgtgccccttcggcgaggtgttcaacgccacccggttcgccagcgtctacgcctggaaccgcaagcggatctccaactgcgtggcggactacagcgtgctgtacaactccgccagcttctccacgttcaagtgctacggcgtcagccccaccaagctcaacgacctgtgcttcaccaacgtgtacgccgactccttcgtgatccgcggggacgaggtccggcagatcgcccccggccagaccgggaagatcgccgactacaactacaagctgccggacgacttcacgggctgcgtgatcgcgtggaacagcaacaacctcgactccaaggtcgggggcaactacaactacctgtaccgcctgttccgcaagagcaacctcaagcccttcgagcgggacatctccaccgagatctaccaggccggcagcaccccctgcaacggggtggagggcttcaactgctacttccccctgcagtcctacgggttccagccgaccaacggcgtggggtaccagccctaccgggtggtcgtgctgagcttcgagctcctgcacgcccccgccacggtgtgcggccccaagaagtccaccaacctggtcaagaacaagtgcgtgaacttcaacttcaacggcctcaccgggaccggcgtgctgaccgagagcaacaagaagttcctgccgttccagcagttcgggcgcgacatcgccgacacgaccgacgcggtccgcgacccccagaccctggagatcctcgacatcaccccctgcagcttcggcggggtgtccgtgatcacgccgggcaccaacaccagcaaccaggtcgccgtgctgtaccaggacgtgaactgcaccgaggtccccgtggccatccacgccgaccagctgacgcccacctggcgggtgtactccaccggcagcaacgtcttccagacccgcgccgggtgcctcatcggcgcggagcacgtgaacaactcctacgagtgcgacatccccatcggggccggcatctgcgccagctaccagacgcagaccaactccccgcggcgcgcccggagcgtggcgtcccagagcatcatcgcctacaccatgtccctgggcgccgagaacagcgtcgcctactccaacaacagcatcgccatccccaccaacttcacgatctccgtgaccaccgagatcctgcccgtgagcatgaccaagacgagcgtcgactgcaccatgtacatctgcggggactccaccgagtgcagcaacctcctgctgcagtacggctccttctgcacccagctcaaccgcgcgctgacggggatcgccgtggagcaggacaagaacacccaggaggtgttcgcccaggtcaagcagatctacaagacgcccccgatcaaggacttcggcgggttcaacttcagccagatcctgcccgacccctccaagcccagcaagcggtccttcatcgaggacctcctgttcaacaaggtgaccctggccgacgccggcttcatcaagcagtacggcgactgcctcggggacatcgcggcccgcgacctgatctgcgcccagaagttcaacggcctgaccgtgctcccgcccctgctgaccgacgagatgatcgcccagtacaccagcgccctcctggcggggaccatcacgtccggctggaccttcggggccggcgccgccctgcagatccccttcgcgatgcagatggcctaccggttcaacggcatcggggtcacccagaacgtgctctacgagaaccagaagctgatcgccaaccagttcaacagcgccatcggcaagatccaggactccctgagctccaccgccagcgcgctcgggaagctgcaggacgtggtcaaccagaacgcccaggccctgaacacgctcgtgaagcagctgtccagcaacttcggcgccatctccagcgtgctgaacgacatcctctcccgcctggacccgcccgaggccgaggtgcagatcgaccggctgatcaccgggcgcctccagagcctgcagacctacgtgacccagcagctgatccgggcggccgagatccgcgccagcgccaacctcgccgcgaccaagatgtccgagtgcgtcctgggccagagcaagcgggtggacttctgcggcaaggggtaccacctgatgtccttcccccagagcgccccgcacggcgtggtcttcctccacgtgacgtacgtccccgcccaggagaagaacttcaccaccgcccccgcgatctgccacgacgggaaggcccacttcccccgcgagggcgtgttcgtgtccaacgggacccactggttcgtcacgcagcggaacttctacgagccgcagatcatcaccaccgacaacaccttcgtgagcggcaactgcgacgtggtcatcggcatcgtgaacaacacggtgtacgaccccctgcagcccgagctggactccttcaaggaggagctcgacaagtacttcaagaaccacaccagccccgacgtcgacctgggggacatctccggcatcaacgccagcgtggtgaacatccagaaggagatcgaccgcctgaacgaggtcgccaagaacctcaacgagtccctgatcgacctgcaggagctcgggaagtacgagcagtacatcaagtggccgtggtacatctggctgggcttcatcgccggcctgatcgcgatcgtgatggtgaccatcatgctctgctgcatgaccagctgctgctcctgcctgaaggggtgctgcagctgcggctcctgctgcaagttcgacgaggacgacagcgagcccgtcctgaagggggtgaagctccactacacgtgaggactagttataagactgactagccctgttcccagagcccacttttttttctttttttgaaataaaatagcctgtctttcacaaaggctcttttcagagccacctaaaaaaaaaaaaaaaaaaaaaaaaaaaaaaaaaaaaaaaaaaaaaaaaaaaaaaaaaaaaaaaaaaaaaaaaaaaaaaaaaaaaaaaaaaaaaaaa

SEQ ID NO: 97 - RNA, 3825 nt, synthetic construct
  source 1..3825: mol_type = other RNA
atgtttgtgttcctggtgctgctgccactggtgagctctcagtgcgtgaatctgaccacacggacccagctgcccccagcctacaccaactcttttacaaggggagtgtattaccctgacaaggtgtttagatccagcgtgctgcacagcacccaggacctgttcctgccattcttttccaatgtgacatggttccacgccatccacgtgtctggaaccaatggaaccaagagattcgacaaccccgtgctgccctttaatgatggcgtgtacttcgccagcaccgagaaaagcaatatcattcgcgggtggattttcggaaccacactggactctaagacccagagcctgctgattgtgaacaatgccaccaacgtggtgattaaggtgtgtgagtttcagttctgtaatgaccccttcctgggagtgtattaccacaagaacaataaatcctggatggaatccgagttccgcgtgtactcttccgccaacaattgcacatttgagtacgtgtcccagccttttctgatggacctggagggcaagcagggaaattttaagaatctgagagaatttgtgttcaagaacatcgacggctacttcaagatttattctaagcatacacctatcaatctggtgcgcgatctgccacaggggttcagcgccctggaacctctggtggatctgccaattggaatcaatatcacacgcttccagaccctgctggccctgcaccgctcctacctgacacccggcgattctagctctgggtggaccgccggagccgccgcctactatgtgggatacctgcagccccgcaccttcctgctgaagtataatgaaaacggcaccattaccgacgccgtggactgtgccctggacccactgagcgaaaccaagtgcacactgaaatccttcaccgtggaaaaagggatctaccagaccagcaacttccgcgtgcagcctaccgaaagcattgtgcgctttcccaatattacaaacctgtgtccatttggcgaggtgttcaacgccacacgcttcgccagcgtgtatgcctggaaccggaaaagaatcagcaactgtgtggccgattacagcgtgctgtacaatagcgcctctttttccacatttaaatgttacggggtgtcccctacaaagctgaatgacctgtgtttcaccaatgtgtatgccgacagcttcgtgattagaggcgacgaggtgcggcagatcgccccaggacagacaggcaaaattgccgattataactacaaactgccagatgactttaccgggtgcgtgatcgcctggaatagcaacaatctggacagcaaagtggggggcaattacaactatctgtacagactgtttcgcaagtctaacctgaaaccattcgagagggacattagcacagagatctatcaggccggatccacaccatgtaacggcgtggaaggctttaattgttactttcccctgcagtcctatgggtttcagccaacaaatggggtggggtatcagccctacagggtggtggtgctgtcctttgaactgctgcatgcccctgccaccgtgtgcgggcctaagaaatctaccaacctggtgaagaataaatgcgtgaatttcaatttcaatgggctgacagggacaggcgtgctgaccgaatccaataagaaatttctgccattccagcagtttgggagggacatcgccgacacaaccgacgccgtgagggatccacagaccctggaaatcctggatattacaccctgtagcttcggcggggtgtccgtgattacaccagggacaaatacatccaaccaggtggccgtgctgtatcaggacgtgaattgtaccgaagtgcccgtggccatccatgccgaccagctgacacctacctggagggtgtatagcaccggcagcaacgtgttccagacaagagccgggtgcctgattggcgccgagcacgtgaacaatagctatgaatgcgatatcccaatcggcgccgggatctgcgcctcctaccagacccagacaaattcccccagacgggccagatctgtggcctcccagtctattatcgcctataccatgtctctgggcgccgagaacagcgtggcctattctaacaattctattgccattcccacaaatttcacaattagcgtgaccacagaaatcctgcccgtgtctatgacaaagacctccgtggattgtacaatgtatatttgtggcgacagcacagagtgcagcaacctgctgctgcagtacggctctttctgcacacagctgaaccgcgccctgacaggtattgccgtggagcaggataaaaacacacaggaagtgtttgcccaggtgaagcagatttacaaaacaccacccattaaagacttcggcggattcaacttctcccagatcctgcctgaccccagcaaaccttccaagagaagctttatcgaggacctgctgtttaacaaagtgaccctggccgatgccggatttatcaaacagtacggggactgcctgggcgatattgccgccagagatctgatctgtgcccagaaattcaatgggctgaccgtgctgcctcccctgctgaccgacgagatgatcgcccagtacaccagcgccctgctggccggcacaatcacctctggctggaccttcggcgccggcgccgccctgcagatcccatttgccatgcagatggcctacagatttaatgggatcggggtgacacagaacgtgctgtatgagaatcagaagctgattgccaatcagttcaacagcgccatcgggaagattcaggacagcctgtctagcacagcctctgccctgggcaagctgcaggatgtggtgaaccagaacgcccaggccctgaataccctggtgaaacagctgtctagcaatttcggggccattagctccgtgctgaatgatatcctgagccgcctggatccacctgaggccgaagtgcagatcgacaggctgatcaccggccggctgcagagcctgcagacctatgtgacccagcagctgattagagccgccgagatccgggcctccgccaacctggccgccaccaagatgtctgaatgcgtgctgggccagtctaaacgtgtggatttttgtgggaaggggtaccatctgatgagctttccccagagcgccccccacggggtggtgttcctgcacgtgacatacgtgcctgcccaggaaaaaaattttacaaccgcccctgccatctgccacgacggaaaggcccattttccaagagagggcgtgttcgtgtctaacgggacccattggtttgtgacccagcggaacttttacgagccccagatcattaccacagataacacctttgtgagcggaaattgtgatgtggtgattggcattgtgaacaataccgtgtacgatccactgcagcctgagctggactctttcaaggaggaactggacaagtatttcaaaaatcacacatcccctgacgtggatctgggagacattagcgggattaacgcctctgtggtgaatatccagaaggagatcgaccggctgaacgaggtggccaagaatctgaatgagagcctgatcgacctgcaggaactgggaaaatacgagcagtatatcaaatggccttggtacatctggctgggcttcatcgccgggctgatcgccatcgtgatggtgacaatcatgctgtgttgcatgacctcctgctgtagctgcctgaagggctgctgttcctgcggatcttgttgcaaatttgatgaagacgattctgagcccgtgctgaaaggcgtgaaactgcactatacatagtaa

SEQ ID NO: 98 - DNA, 6563 bp, synthetic construct
  source 1..6563: mol_type = other DNA
acgcgtgcctaaattaatacgactcactataagagaataaactagtattcttctggtccccacagactcagagagaacccgccaccatgttcgtgttcctggtgctgctgcccctggtgagcagccagtgcgtgaacctgaccaccaggacccagctgccccccgcctacaccaacagcttcacccggggcgtgtactaccccgacaaggtgttcaggagcagcgtgctgcacagcacccaggacctgttcctgcccttcttcagcaacgtgacctggttccacgtgatcagcggcaccaacggcaccaagcggttcgacaaccccgtgctgcccttcaacgacggcgtgtacttcgccagcatcgagaaaagcaacatcatccggggctggatcttcggcaccaccctggacagcaagacccagagcctgctgatcgtgaacaacgccaccaacgtggtgatcaaggtgtgcgagttccagttctgcaacgaccccttcctggaccacaagaacaacaagagctggatggagagcgagttccgggtgtacagcagcgccaacaactgcaccttcgagtacgtgagccagcccttcctgatggacctggagggcaagcagggcaacttcaagaacctgcgggagttcgtgttcaagaacatcgacggctacttcaagatctacagcaagcacacccccatcatcgtgagggagcccgaggacctgccccagggcttcagcgccctggagcccctggtggacctgcccatcggcatcaacatcaccaggttccagaccctgctggccctgcatcggagctacctgacccccggcgatagtagcagcggctggaccgccggcgctgccgcctattacgtgggctacctgcagcccaggaccttcctactgaagtacaacgagaacggcaccatcaccgacgccgtggactgcgccctggaccccctgagcgagaccaagtgcaccctgaaaagcttcaccgtggagaagggcatctaccagaccagcaacttcagggtgcagcccaccgagagcatcgtgaggttccccaacatcaccaacctgtgccccttcgacgaggtgttcaacgccacccggttcgccagcgtgtacgcctggaaccggaagcggatcagcaactgcgtggccgactacagcgtgctgtacaacctggcccccttcttcaccttcaagtgctacggcgtgagccccaccaagctgaacgacctgtgcttcaccaacgtgtacgccgacagcttcgtgatcaggggcgacgaggtgcggcagatcgcccccggccagaccggcaacatcgccgactacaactacaagctgcccgacgacttcaccggctgcgtgatcgcctggaacagcaacaagctggacagcaaggtgagcggcaactacaactacctgtaccggctgttcaggaaaagcaacctgaagcccttcgagagggacatcagcaccgagatctaccaggccggcaacaagccctgcaacggcgtggccggcttcaactgctacttccccctgcggagctacagcttccggcccacctacggcgtgggccaccaaccctaccgggtggtggttctgagcttcgaactgctgcacgcccccgccaccgtgtgcggccccaagaaaagcaccaatctggtgaagaacaagtgcgtgaacttcaacttcaacggcctgaagggcaccggcgtgctgaccgagagcaacaagaagttcctgcccttccagcagttcggcagggacatcgccgacaccaccgacgccgtgcgggacccccagaccctggagatcctggacatcaccccctgcagcttcggcggcgtgagcgtgattacccctggcaccaacaccagcaaccaggtggccgtgctgtaccagggcgtgaactgcaccgaggtgcccgtggccatccacgcggaccagctgacccccacttggcgggtgtatagcaccggcagcaacgtgttccaaacccgggccggctgcctgatcggagccgagtatgtgaacaacagctacgagtgcgacatccccatcggcgccggcatctgcgccagctaccagacccagaccaagagccaccggagggcccggagcgtggccagccagagcatcatcgcctacaccatgagcctgggcgccgagaacagcgtggcctacagcaacaacagcatcgccatccccaccaacttcaccatcagcgtgaccaccgagatcctgcccgtgagcatgaccaagaccagcgtggactgcaccatgtacatctgcggcgacagcaccgagtgcagcaacctgctgctgcagtacggcagcttctgcacccagctgaagcgcgccctgaccggcatcgccgtggagcaggacaagaacacccaggaggtgttcgcccaggtgaagcagatctacaagaccccccccatcaagtacttcggcggcttcaacttcagccagatcctgcccgaccccagcaagcccagcaagcggagcttcatcgaggacctgctgttcaacaaggtgaccctggccgacgccggcttcatcaagcagtacggcgactgcctgggcgacatcgccgcccgggacctgatctgcgcccagaagttcaagggcctgaccgtgctgccccctctgctgaccgacgaaatgatcgcccagtacaccagtgccctgctggccggcaccataaccagcggatggaccttcggcgccggcgccgcccttcagatccccttcgccatgcagatggcctaccggttcaacggcatcggcgtgacccagaacgtgctgtacgagaaccagaagctgatcgccaaccagttcaacagcgccatcggcaagatccaggacagcctgagcagcaccgccagcgccctgggcaagctgcaggacgtggtgaaccacaacgcccaggccctgaacaccctggtgaagcagctgagcagcaagttcggcgccatcagcagcgtgctgaacgacatcttcagccggctggacccccccgaggccgaggtgcagatcgacaggctgatcactggtcggctgcagagcctgcagacctacgtgacccagcaactgatccgggccgccgagatccgcgccagcgccaacctagccgccaccaagatgagcgagtgcgtgctgggccagagcaagcgggtggacttctgcggaaaaggctaccacctgatgagcttcccccagagcgccccacacggcgtggtgttcctgcacgtgacctacgtgcccgcccaggagaagaacttcaccaccgcccccgccatctgccacgacggcaaggcccacttcccccgggagggcgtgttcgtgagcaacggcacccactggttcgtgacccagcggaacttctacgagccccagatcatcaccaccgacaacaccttcgtgagcggcaactgcgacgtggtgatcggcatcgtgaacaacaccgtgtacgaccccctgcagcccgagctggacagcttcaaggaggagctggacaagtacttcaagaaccacaccagccccgacgtggacctgggcgacatcagcggcatcaacgccagcgtggtgaacatccagaaggagatcgaccggctgaacgaggtggccaagaacctgaacgagagcctgatcgacctgcaggagctgggcaagtacgagcagtacatcaagtggccctggtacatctggctgggcttcatcgccggcctgatcgccatcgtgatggtgaccatcatgctgtgctgcatgaccagctgctgcagctgcctgaagggctgctgcagctgcggcagctgctgcaagttcgacgaggacgacagcgagcccgtgctgaagggcgtgaagctgcactacacctgataactcgagctggtactgcatgcacacaatgctagctgcccctttcccgtcctgggtaccccgagtctcccccgacctcgggtcccaggtatgctcccacctccacctgccccactcaccacctctgctagttccagacacctcccaagcacgcaacaatgcagctcaaaacgcttagcctagccacacccccacgggaaacagcagtgattaacctttagcaataaacgaaagtttaactaagctatactaaccccagggttggtcaatttcgtgccagccacaccctggagctagcttcattgcaaaaaaaaaaaaaaaaaaaaaaaaaaaaaagcatatgactaaaaaaaaaaaaaaaaaaaaaaaaaaaaaaaaaaaaaaaaaaaaaaaaaaaaaaaaaaaaaaaaaaaaaaaaaaaaaaaaaaaaaaaagaagagcgtttaaacacgtgatatctggcctcatgggccttcctttcactgcccgctttccagtcgggaaacctgtcgtgccagctgcattaacatggtcatagctgtttccttgcgtattgggcgctctccgcttcctcgctcactgactcgctgcgctcggtcgttcgggtaaagcctggggtgcctaatgagcaaaaggccagcaaaaggccaggaaccgtaaaaaggccgcgttgctggcgtttttccataggctccgcccccctgacgagcatcacaaaaatcgacgctcaagtcagaggtggcgaaacccgacaggactataaagataccaggcgtttccccctggaagctccctcgtgcgctctcctgttccgaccctgccgcttaccggatacctgtccgcctttctcccttcgggaagcgtggcgctttctcatagctcacgctgtaggtatctcagttcggtgtaggtcgttcgctccaagctgggctgtgtgcacgaaccccccgttcagcccgaccgctgcgccttatccggtaactatcgtcttgagtccaacccggtaagacacgacttatcgccactggcagcagccactggtaacaggattagcagagcgaggtatgtaggcggtgctacagagttcttgaagtggtggcctaactacggctacactagaagaacagtatttggtatctgcgctctgctgaagccagttaccttcggaaaaagagttggtagctcttgatccggcaaacaaaccaccgctggtagcggtggtttttttgtttgcaagcagcagattacgcgcagaaaaaaaggatctcaagaagatcctttgatcttttctacggggtctgacgctcagtggaacgaaaactcacgttaagggattttggtcatgaatacacggtgcctgactgcgttagcaatttaactgtgataaactaccgcattaaagcttatcgatgataagctgtcaaacatgagaattcttagaaaaactcatcgagcatcaaatgaaactgcaatttattcatatcaggattatcaataccatatttttgaaaaagccgtttctgtaatgaaggagaaaactcaccgaggcagttccataggatggcaagatcctggtatcggtctgcgattccgactcgtccaacatcaatacaacctattaatttcccctcgtcaaaaataaggttatcaagtgagaaatcaccatgagtgacgactgaatccggtgagaatggcaaaagcttatgcatttctttccagacttgttcaacaggccagccattacgctcgtcatcaaaatcactcgcatcaaccaaaccgttattcattcgtgattgcgcctgagcgagacgaaatacgcgatcgctgttaaaaggacaattacaaacaggaatcgaatgcaaccggcgcaggaacactgccagcgcatcaacaatattttcacctgaatcaggatattcttctaatacctggaatgctgttttcccggggatcgcagtggtgagtaaccatgcatcatcaggagtacggataaaatgcttgatggtcggaagaggcataaattccgtcagccagtttagtctgaccatctcatctgtaacatcattggcaacgctacctttgccatgtttcagaaacaactctggcgcatcgggcttcccatacaatcgatagattgtcgcacctgattgcccgacattatcgcgagcccatttatacccatataaatcagcatccatgttggaatttaatcgcggcctcgagcaagacgtttcccgttgaatatggctcataacaccccttgtattactgtttatgtaagcagacagttttattgttcatgagcggatacatatttgaatgtatttagaaaaataaacaaataggggttccgcgcacatttccccgaaaagtgccacctaaattgtaagcgttaatattttgttaaaattcgcgttaaatttttgttaaatcagctcattttttaaccaataggccgaaatcggcaaaatcccttataaatcaaaagaatagaccgagatagggttgagtggccgctacagggcgctcccattcgccattcaggctgcgcaactgttgggaagggcgtttcggtgcgggcctcttcgctattacgccagctggcgaaagggggatgtgctgcaaggcgattaagttgggtaacgccagggttttcccagtcac

SEQ ID NO: 99 - DNA, 6809 bp, synthetic construct
  source 1..6809: mol_type = other DNA
tcgcgcgtttcggtgatgacggtgaaaacctctgacacatgcagctcccggagactgtcacagcttgtctgtaagcggatgccgggagcagacaagcccgtcagggcgcgtcagcgggtgttggcgggtgtcggggctggcttaactatgcggcatcagagcagattgtactgagagtgcaccatatgcggtgtgaaataccgcacagatgcgtaaggagaaaataccgcatcaggcgccattcgccattcaggctgcgcaactgttgggaagggcgatcggtgcgggcctcttcgctattacgccagctggcgaaagggggatgtgctgcaaggcgattaagttgggtaacgccagggttttcccagtcacgacgttgtaaaacgacggccagtgaattgacgcgtattgggatacgcgtaatacgactcactataagattccccgcctcctcctgtcccgcagtcggcgtccagcggctctgcttgttcgtgtgtgtgtcgttgcaggccttattcatgttcgtgttcctggtcctcctgcccctggtgagctcccagtgcgtgaacctcaccacccgcacgcagctgccgcccgcctacaccaacagcttcacccggggcgtctactaccccgacaaggtgttccgctccagcgtgctgcactccacccaggacctcttcctgcccttcttcagcaacgtcacgtggttccacgccatccacgtgtccgggaccaacggcaccaagcggttcgacaacccggtgctgcccttcaacgacggggtctacttcgcgagcaccgagaagtccaacatcatccgcggctggatcttcgggacgaccctcgacagcaagacccagtccctgctgatcgtgaacaacgccaccaacgtggtcatcaaggtgtgcgagttccagttctgcaacgaccccttcctcggcgtgtactaccacaagaacaacaagagctggatggagtccgagttccgggtctacagctccgccaacaactgcacgttcgagtacgtgagccagcccttcctgatggacctggagggcaagcaggggaacttcaagaacctccgcgagttcgtgttcaagaacatcgacggctacttcaagatctactccaagcacaccccgatcaacctggtccgggacctgccccaggggttcagcgccctcgagcccctggtggacctgcccatcggcatcaacatcacccgcttccagaccctcctggccctgcaccggtcctacctcacgccgggggacagcagctccggctggaccgcgggcgccgccgcctactacgtggggtacctgcagccccgcaccttcctgctcaagtacaacgagaacggcaccatcacggacgcggtcgactgcgccctggaccccctgagcgagaccaagtgcaccctcaagtccttcaccgtggagaaggggatctaccagacgagcaacttccgggtgcagcccaccgagtccatcgtccgcttcccgaacatcaccaacctgtgccccttcggcgaggtgttcaacgccacccggttcgccagcgtctacgcctggaaccgcaagcggatctccaactgcgtggcggactacagcgtgctgtacaactccgccagcttctccacgttcaagtgctacggcgtcagccccaccaagctcaacgacctgtgcttcaccaacgtgtacgccgactccttcgtgatccgcggggacgaggtccggcagatcgcccccggccagaccgggaagatcgccgactacaactacaagctgccggacgacttcacgggctgcgtgatcgcgtggaacagcaacaacctcgactccaaggtcgggggcaactacaactacctgtaccgcctgttccgcaagagcaacctcaagcccttcgagcgggacatctccaccgagatctaccaggccggcagcaccccctgcaacggggtggagggcttcaactgctacttccccctgcagtcctacgggttccagccgaccaacggcgtggggtaccagccctaccgggtggtcgtgctgagcttcgagctcctgcacgcccccgccacggtgtgcggccccaagaagtccaccaacctggtcaagaacaagtgcgtgaacttcaacttcaacggcctcaccgggaccggcgtgctgaccgagagcaacaagaagttcctgccgttccagcagttcgggcgcgacatcgccgacacgaccgacgcggtccgcgacccccagaccctggagatcctcgacatcaccccctgcagcttcggcggggtgtccgtgatcacgccgggcaccaacaccagcaaccaggtcgccgtgctgtaccaggacgtgaactgcaccgaggtccccgtggccatccacgccgaccagctgacgcccacctggcgggtgtactccaccggcagcaacgtcttccagacccgcgccgggtgcctcatcggcgcggagcacgtgaacaactcctacgagtgcgacatccccatcggggccggcatctgcgccagctaccagacgcagaccaactccccgcggcgcgcccggagcgtggcgtcccagagcatcatcgcctacaccatgtccctgggcgccgagaacagcgtcgcctactccaacaacagcatcgccatccccaccaacttcacgatctccgtgaccaccgagatcctgcccgtgagcatgaccaagacgagcgtcgactgcaccatgtacatctgcggggactccaccgagtgcagcaacctcctgctgcagtacggctccttctgcacccagctcaaccgcgcgctgacggggatcgccgtggagcaggacaagaacacccaggaggtgttcgcccaggtcaagcagatctacaagacgcccccgatcaaggacttcggcgggttcaacttcagccagatcctgcccgacccctccaagcccagcaagcggtccttcatcgaggacctcctgttcaacaaggtgaccctggccgacgccggcttcatcaagcagtacggcgactgcctcggggacatcgcggcccgcgacctgatctgcgcccagaagttcaacggcctgaccgtgctcccgcccctgctgaccgacgagatgatcgcccagtacaccagcgccctcctggcggggaccatcacgtccggctggaccttcggggccggcgccgccctgcagatccccttcgcgatgcagatggcctaccggttcaacggcatcggggtcacccagaacgtgctctacgagaaccagaagctgatcgccaaccagttcaacagcgccatcggcaagatccaggactccctgagctccaccgccagcgcgctcgggaagctgcaggacgtggtcaaccagaacgcccaggccctgaacacgctcgtgaagcagctgtccagcaacttcggcgccatctccagcgtgctgaacgacatcctctcccgcctggacccgcccgaggccgaggtgcagatcgaccggctgatcaccgggcgcctccagagcctgcagacctacgtgacccagcagctgatccgggcggccgagatccgcgccagcgccaacctcgccgcgaccaagatgtccgagtgcgtcctgggccagagcaagcgggtggacttctgcggcaaggggtaccacctgatgtccttcccccagagcgccccgcacggcgtggtcttcctccacgtgacgtacgtccccgcccaggagaagaacttcaccaccgcccccgcgatctgccacgacgggaaggcccacttcccccgcgagggcgtgttcgtgtccaacgggacccactggttcgtcacgcagcggaacttctacgagccgcagatcatcaccaccgacaacaccttcgtgagcggcaactgcgacgtggtcatcggcatcgtgaacaacacggtgtacgaccccctgcagcccgagctggactccttcaaggaggagctcgacaagtacttcaagaaccacaccagccccgacgtcgacctgggggacatctccggcatcaacgccagcgtggtgaacatccagaaggagatcgaccgcctgaacgaggtcgccaagaacctcaacgagtccctgatcgacctgcaggagctcgggaagtacgagcagtacatcaagtggccgtggtacatctggctgggcttcatcgccggcctgatcgcgatcgtgatggtgaccatcatgctctgctgcatgaccagctgctgctcctgcctgaaggggtgctgcagctgcggctcctgctgcaagttcgacgaggacgacagcgagcccgtcctgaagggggtgaagctccactacacgtgaggactagttataagactgactagccctgttcccagagcccacttttttttctttttttgaaataaaatagcctgtctttcacaaaggctcttttcagagccacctaaaaaaaaaaaaaaaaaaaaaaaaaaaaaaaaaaaaaaaaaaaaaaaaaaaaaaaaaaaaaaaaaaaaaaaaaaaaaaaaaaaaaaaaaaaaaaaaaaaagaagagcgatcccaatggcgcgccgagcttggcgtaatcatggtcatagctgtttcctgtgtgaaattgttatccgctcacaattccacacaacatacgagccggaagcataaagtgtaaagcctggggtgcctaatgagtgagctaactcacattaattgcgttgcgctcactgcccgctttccagtcgggaaacctgtcgtgccagctgcattaatgaatcggccaacgcgcggggagaggcggtttgcgtattgggcgctgttccgcttcctcgctcactgactcgctgcgctcggtcgttcggctgcggcgagcggtatcagctcactcaaaggcggtaatacggttatccacagaatcaggggataacgcaggaaagaacatgtgagcaaaaggccagcaaaaggccaggaaccgtaaaaaggccgcgttgctggcgtttttccataggctccgcccccctgacgagcatcacaaaaatcgacgctcaagtcagaggtggcgaaacccgacaggactataaagataccaggcgtttccccctggaagctccctcgtgcgctctcctgttccgaccctgccgcttaccggatacctgtccgcctttctcccttcgggaagcgtggcgctttctcatagctcacgctgtaggtatctcagttcggtgtaggtcgttcgctccaagctgggctgtgtgcacgaaccccccgttcagcccgaccgctgcgccttatccggtaactatcgtcttgagtccaacccggtaagacacgacttatcgccactggcagcagccactggtaacaggattagcagagcgaggtatgtaggcggtgctacagagttcttgaagtggtggcctaactacggctacactagaagaacagtatttggtatctgcgctctgctgaagccagttaccttcggaaaaagagttggtagctcttgatccggcaaacaaaccaccgctggtagcggtggtttttttgtttgcaagcagcagattacgcgcagaaaaaaaggatctcaagaagatcctttgatcttttctacggggtctgacgctcagtggaacgaaaactcacgttaagggattttggtcatgagattatcaaaaaggatcttcacctagatccttttaaattaaaaatgaagttttaaatcaatctaaagtatatatgagtaaacttggtctgacagttaccaatgcttaatcagtgaggcacctatctcagcgatctgtctatttcgttcatccatagttgcctgactccccgtcgtgtagataactacgatacgggagggcttaccatctggccccagtgctgcaatgataccgcgagaaccacgctcaccggctccagatttatcagcaataaaccagccagccggaagggccgagcgcagaagtggtcctgcaactttatccgcctccatccagtctattaattgttgccgggaagctagagtaagtagttcgccagttaatagtttgcgcaacgttgttgccattgctacaggcatcgtggtgtcacgctcgtcgtttggtatggcttcattcagctccggttcccaacgatcaaggcgagttacatgatcccccatgttgtgcaaaaaagcggttagctccttcggtcctccgatcgttgtcagaagtaagttggccgcagtgttatcactcatggttatggcagcactgcataattctcttactgtcatgccatccgtaagatgcttttctgtgactggtgagtactcaaccaagtcattctgagaatagtgtatgcggcgaccgagttgctcttgcccggcgtcaatacgggataataccgcgccacatagcagaactttaaaagtgctcatcattggaaaacgttcttcggggcgaaaactctcaaggatcttaccgctgttgagatccagttcgatgtaacccactcgtgcacccaactgatcttcagcatcttttactttcaccagcgtttctgggtgagcaaaaacaggaaggcaaaatgccgcaaaaaagggaataagggcgacacggaaatgttgaatactcatactcttcctttttcaatattattgaagcatttatcagggttattgtctcatgagcggatacatatttgaatgtatttagaaaaataaacaaataggggttccgcgcacatttccccgaaaagtgccacctgacgtctaagaaaccattattatcatgacattaacctataaaaataggcgtatcacgaggcccttttgtc

SEQ ID NO: 100 - DNA, 6668 bp, synthetic construct
  source 1..6668: mol_type = other DNA
acgcgtgcctaaattaatacgactcactataaggaagaacgcccccaaaatctgtttctaattttacagaaatcttttgaaacttggcacggtattcaaaagtccgtggaaagaaaaaaaccttgtcctggcttcagcttccaactacaaagacagacttggtccttttcaacggttttcacagatccagtgacccacgctctgaagacagaattagctaactttcaaaaacatctggaaaaatgtttgtgttcctggtgctgctgccactggtgagctctcagtgcgtgaatctgaccacacggacccagctgcccccagcctacaccaactcttttacaaggggagtgtattaccctgacaaggtgtttagatccagcgtgctgcacagcacccaggacctgttcctgccattcttttccaatgtgacatggttccacgccatccacgtgtctggaaccaatggaaccaagagattcgacaaccccgtgctgccctttaatgatggcgtgtacttcgccagcaccgagaaaagcaatatcattcgcgggtggattttcggaaccacactggactctaagacccagagcctgctgattgtgaacaatgccaccaacgtggtgattaaggtgtgtgagtttcagttctgtaatgaccccttcctgggagtgtattaccacaagaacaataaatcctggatggaatccgagttccgcgtgtactcttccgccaacaattgcacatttgagtacgtgtcccagccttttctgatggacctggagggcaagcagggaaattttaagaatctgagagaatttgtgttcaagaacatcgacggctacttcaagatttattctaagcatacacctatcaatctggtgcgcgatctgccacaggggttcagcgccctggaacctctggtggatctgccaattggaatcaatatcacacgcttccagaccctgctggccctgcaccgctcctacctgacacccggcgattctagctctgggtggaccgccggagccgccgcctactatgtgggatacctgcagccccgcaccttcctgctgaagtataatgaaaacggcaccattaccgacgccgtggactgtgccctggacccactgagcgaaaccaagtgcacactgaaatccttcaccgtggaaaaagggatctaccagaccagcaacttccgcgtgcagcctaccgaaagcattgtgcgctttcccaatattacaaacctgtgtccatttggcgaggtgttcaacgccacacgcttcgccagcgtgtatgcctggaaccggaaaagaatcagcaactgtgtggccgattacagcgtgctgtacaatagcgcctctttttccacatttaaatgttacggggtgtcccctacaaagctgaatgacctgtgtttcaccaatgtgtatgccgacagcttcgtgattagaggcgacgaggtgcggcagatcgccccaggacagacaggcaaaattgccgattataactacaaactgccagatgactttaccgggtgcgtgatcgcctggaatagcaacaatctggacagcaaagtggggggcaattacaactatctgtacagactgtttcgcaagtctaacctgaaaccattcgagagggacattagcacagagatctatcaggccggatccacaccatgtaacggcgtggaaggctttaattgttactttcccctgcagtcctatgggtttcagccaacaaatggggtggggtatcagccctacagggtggtggtgctgtcctttgaactgctgcatgcccctgccaccgtgtgcgggcctaagaaatctaccaacctggtgaagaataaatgcgtgaatttcaatttcaatgggctgacagggacaggcgtgctgaccgaatccaataagaaatttctgccattccagcagtttgggagggacatcgccgacacaaccgacgccgtgagggatccacagaccctggaaatcctggatattacaccctgtagcttcggcggggtgtccgtgattacaccagggacaaatacatccaaccaggtggccgtgctgtatcaggacgtgaattgtaccgaagtgcccgtggccatccatgccgaccagctgacacctacctggagggtgtatagcaccggcagcaacgtgttccagacaagagccgggtgcctgattggcgccgagcacgtgaacaatagctatgaatgcgatatcccaatcggcgccgggatctgcgcctcctaccagacccagacaaattcccccagacgggccagatctgtggcctcccagtctattatcgcctataccatgtctctgggcgccgagaacagcgtggcctattctaacaattctattgccattcccacaaatttcacaattagcgtgaccacagaaatcctgcccgtgtctatgacaaagacctccgtggattgtacaatgtatatttgtggcgacagcacagagtgcagcaacctgctgctgcagtacggctctttctgcacacagctgaaccgcgccctgacaggtattgccgtggagcaggataaaaacacacaggaagtgtttgcccaggtgaagcagatttacaaaacaccacccattaaagacttcggcggattcaacttctcccagatcctgcctgaccccagcaaaccttccaagagaagctttatcgaggacctgctgtttaacaaagtgaccctggccgatgccggatttatcaaacagtacggggactgcctgggcgatattgccgccagagatctgatctgtgcccagaaattcaatgggctgaccgtgctgcctcccctgctgaccgacgagatgatcgcccagtacaccagcgccctgctggccggcacaatcacctctggctggaccttcggcgccggcgccgccctgcagatcccatttgccatgcagatggcctacagatttaatgggatcggggtgacacagaacgtgctgtatgagaatcagaagctgattgccaatcagttcaacagcgccatcgggaagattcaggacagcctgtctagcacagcctctgccctgggcaagctgcaggatgtggtgaaccagaacgcccaggccctgaataccctggtgaaacagctgtctagcaatttcggggccattagctccgtgctgaatgatatcctgagccgcctggatccacctgaggccgaagtgcagatcgacaggctgatcaccggccggctgcagagcctgcagacctatgtgacccagcagctgattagagccgccgagatccgggcctccgccaacctggccgccaccaagatgtctgaatgcgtgctgggccagtctaaacgtgtggatttttgtgggaaggggtaccatctgatgagctttccccagagcgccccccacggggtggtgttcctgcacgtgacatacgtgcctgcccaggaaaaaaattttacaaccgcccctgccatctgccacgacggaaaggcccattttccaagagagggcgtgttcgtgtctaacgggacccattggtttgtgacccagcggaacttttacgagccccagatcattaccacagataacacctttgtgagcggaaattgtgatgtggtgattggcattgtgaacaataccgtgtacgatccactgcagcctgagctggactctttcaaggaggaactggacaagtatttcaaaaatcacacatcccctgacgtggatctgggagacattagcgggattaacgcctctgtggtgaatatccagaaggagatcgaccggctgaacgaggtggccaagaatctgaatgagagcctgatcgacctgcaggaactgggaaaatacgagcagtatatcaaatggccttggtacatctggctgggcttcatcgccgggctgatcgccatcgtgatggtgacaatcatgctgtgttgcatgacctcctgctgtagctgcctgaagggctgctgttcctgcggatcttgttgcaaatttgatgaagacgattctgagcccgtgctgaaaggcgtgaaactgcactatacatagaaacgatgcagatgcaagcctgtatcagaatctgaaaaccttatataaacccctcagacagtttgcttattttattttttatgttgtaaaatgctagtataaacaaacaaattaatgttgttctaaaggctgttaaaaaaaagatgaggactcagaagttcaagctaaatattgtttacattttctggtactctgtgaaagaagagaaaagggagtcatgcattttgctttggacacagtgttttatcacctgttcatttgaagaaaaataataaagtcagaagttcattgcaaaaaaaaaaaaaaaaaaaaaaaaaaaaaagcatatgactaaaaaaaaaaaaaaaaaaaaaaaaaaaaaaaaaaaaaaaaaagaagagcgtttaaacacgtgatatctggcctcatgggccttcctttcactgcccgctttccagtcgggaaacctgtcgtgccagctgcattaacatggtcatagctgtttccttgcgtattgggcgctctccgcttcctcgctcactgactcgctgcgctcggtcgttcgggtaaagcctggggtgcctaatgagcaaaaggccagcaaaaggccaggaaccgtaaaaaggccgcgttgctggcgtttttccataggctccgcccccctgacgagcatcacaaaaatcgacgctcaagtcagaggtggcgaaacccgacaggactataaagataccaggcgtttccccctggaagctccctcgtgcgctctcctgttccgaccctgccgcttaccggatacctgtccgcctttctcccttcgggaagcgtggcgctttctcatagctcacgctgtaggtatctcagttcggtgtaggtcgttcgctccaagctgggctgtgtgcacgaaccccccgttcagcccgaccgctgcgccttatccggtaactatcgtcttgagtccaacccggtaagacacgacttatcgccactggcagcagccactggtaacaggattagcagagcgaggtatgtaggcggtgctacagagttcttgaagtggtggcctaactacggctacactagaagaacagtatttggtatctgcgctctgctgaagccagttaccttcggaaaaagagttggtagctcttgatccggcaaacaaaccaccgctggtagcggtggtttttttgtttgcaagcagcagattacgcgcagaaaaaaaggatctcaagaagatcctttgatcttttctacggggtctgacgctcagtggaacgaaaactcacgttaagggattttggtcatgaatacacggtgcctgactgcgttagcaatttaactgtgataaactaccgcattaaagcttatcgatgataagctgtcaaacatgagaattcttagaaaaactcatcgagcatcaaatgaaactgcaatttattcatatcaggattatcaataccatatttttgaaaaagccgtttctgtaatgaaggagaaaactcaccgaggcagttccataggatggcaagatcctggtatcggtctgcgattccgactcgtccaacatcaatacaacctattaatttcccctcgtcaaaaataaggttatcaagtgagaaatcaccatgagtgacgactgaatccggtgagaatggcaaaagcttatgcatttctttccagacttgttcaacaggccagccattacgctcgtcatcaaaatcactcgcatcaaccaaaccgttattcattcgtgattgcgcctgagcgagacgaaatacgcgatcgctgttaaaaggacaattacaaacaggaatcgaatgcaaccggcgcaggaacactgccagcgcatcaacaatattttcacctgaatcaggatattcttctaatacctggaatgctgttttcccggggatcgcagtggtgagtaaccatgcatcatcaggagtacggataaaatgcttgatggtcggaagaggcataaattccgtcagccagtttagtctgaccatctcatctgtaacatcattggcaacgctacctttgccatgtttcagaaacaactctggcgcatcgggcttcccatacaatcgatagattgtcgcacctgattgcccgacattatcgcgagcccatttatacccatataaatcagcatccatgttggaatttaatcgcggcctcgagcaagacgtttcccgttgaatatggctcataacaccccttgtattactgtttatgtaagcagacagttttattgttcatgagcggatacatatttgaatgtatttagaaaaataaacaaataggggttccgcgcacatttccccgaaaagtgccacctaaattgtaagcgttaatattttgttaaaattcgcgttaaatttttgttaaatcagctcattttttaaccaataggccgaaatcggcaaaatcccttataaatcaaaagaatagaccgagatagggttgagtggccgctacagggcgctcccattcgccattcaggctgcgcaactgttgggaagggcgtttcggtgcgggcctcttcgctattacgccagctggcgaaagggggatgtgctgcaaggcgattaagttgggtaacgccagggttttcccagtcac

SEQ ID NO: 101 - DNA, 6293 bp, synthetic construct
  source 1..6293: mol_type = other DNA
acgcgtgcctaaattaatacgactcactataaggagaagctgtctatcgggctccagcggtcatgtttgtgttcctggtgctgctgccactggtgagctctcagtgcgtgaatctgaccacacggacccagctgcccccagcctacaccaactcttttacaaggggagtgtattaccctgacaaggtgtttagatccagcgtgctgcacagcacccaggacctgttcctgccattcttttccaatgtgacatggttccacgccatccacgtgtctggaaccaatggaaccaagagattcgacaaccccgtgctgccctttaatgatggcgtgtacttcgccagcaccgagaaaagcaatatcattcgcgggtggattttcggaaccacactggactctaagacccagagcctgctgattgtgaacaatgccaccaacgtggtgattaaggtgtgtgagtttcagttctgtaatgaccccttcctgggagtgtattaccacaagaacaataaatcctggatggaatccgagttccgcgtgtactcttccgccaacaattgcacatttgagtacgtgtcccagccttttctgatggacctggagggcaagcagggaaattttaagaatctgagagaatttgtgttcaagaacatcgacggctacttcaagatttattctaagcatacacctatcaatctggtgcgcgatctgccacaggggttcagcgccctggaacctctggtggatctgccaattggaatcaatatcacacgcttccagaccctgctggccctgcaccgctcctacctgacacccggcgattctagctctgggtggaccgccggagccgccgcctactatgtgggatacctgcagccccgcaccttcctgctgaagtataatgaaaacggcaccattaccgacgccgtggactgtgccctggacccactgagcgaaaccaagtgcacactgaaatccttcaccgtggaaaaagggatctaccagaccagcaacttccgcgtgcagcctaccgaaagcattgtgcgctttcccaatattacaaacctgtgtccatttggcgaggtgttcaacgccacacgcttcgccagcgtgtatgcctggaaccggaaaagaatcagcaactgtgtggccgattacagcgtgctgtacaatagcgcctctttttccacatttaaatgttacggggtgtcccctacaaagctgaatgacctgtgtttcaccaatgtgtatgccgacagcttcgtgattagaggcgacgaggtgcggcagatcgccccaggacagacaggcaaaattgccgattataactacaaactgccagatgactttaccgggtgcgtgatcgcctggaatagcaacaatctggacagcaaagtggggggcaattacaactatctgtacagactgtttcgcaagtctaacctgaaaccattcgagagggacattagcacagagatctatcaggccggatccacaccatgtaacggcgtggaaggctttaattgttactttcccctgcagtcctatgggtttcagccaacaaatggggtggggtatcagccctacagggtggtggtgctgtcctttgaactgctacatgcccctgccaccgtgtgcgggcctaagaaatctaccaacctggtgaagaataaatgcgtgaatttcaatttcaatgggctgacagggacaggcgtgctgaccgaatccaataagaaatttctgccattccagcagtttgggagggacatcgccgacacaaccgacgccgtgagggatccacagaccctggaaatcctggatattacaccctgtagcttcggcggggtgtccgtgattacaccagggacaaatacatccaaccaggtggccgtgctgtatcaggacgtgaattgtaccgaagtgcccgtggccatccatgccgaccagctgacacctacctggagggtgtatagcaccggcagcaacgtgttccagacaagagccgggtgcctgattggcgccgagcacgtgaacaatagctatgaatgcgatatcccaatcggcgccgggatctgcgcctcctaccagacccagacaaattcccccagacgggccagatctgtggcctcccagtctattatcgcctataccatgtctctgggcgccgagaacagcgtggcctattctaacaattctattgccattcccacaaatttcacaattagcgtgaccacagaaatcctgcccgtgtctatgacaaagacctccgtggattgtacaatgtatatttgtggcgacagcacagagtgcagcaacctgctgctgcagtacggctctttctgcacacagctgaaccgcgccctgacaggtattgccgtggagcaggataaaaacacacaggaagtgtttgcccaggtgaagcagatttacaaaacaccacccattaaagacttcggcggattcaacttctcccagatcctgcctgaccccagcaaaccttccaagagaagctttatcgaggacctgctgtttaacaaagtgaccctggccgatgccggatttatcaaacagtacggggactgcctgggcgatattgccgccagagatctgatctgtgcccagaaattcaatgggctgaccgtgctgcctcccctgctgaccgacgagatgatcgcccagtacaccagcgccctgctggccggcacaatcacctctggctggaccttcggcgccggcgccgccctgcagatcccatttgccatgcagatggcctacagatttaatgggatcggggtgacacagaacgtgctgtatgagaatcagaagctgattgccaatcagttcaacagcgccatcgggaagattcaggacagcctgtctagcacagcctctgccctgggcaagctgcaggatgtggtgaaccagaacgcccaggccctgaataccctggtgaaacagctgtctagcaatttcggggccattagctccgtgctgaatgatatcctgagccgcctggatccacctgaggccgaagtgcagatcgacaggctgatcaccggccggctgcagagcctgcagacctatgtgacccagcagctgattagagccgccgagatccgggcctccgccaacctggccgccaccaagatgtctgaatgcgtgctgggccagtctaaacgtgtggatttttgtgggaaggggtaccatctgatgagctttccccagagcgccccccacggggtggtgttcctgcacgtgacatacgtgcctgcccaggaaaaaaattttacaaccgcccctgccatctgccacgacggaaaggcccattttccaagagagggcgtgttcgtgtctaacgggacccattggtttgtgacccagcggaacttttacgagccccagatcattaccacagataacacctttgtgagcggaaattgtgatgtggtgattggcattgtgaacaataccgtgtacgatccactgcagcctgagctggactctttcaaggaggaactggacaagtatttcaaaaatcacacatcccctgacgtggatctgggagacattagcgggattaacgcctctgtggtgaatatccagaaggagatcgaccggctgaacgaggtggccaagaatctgaatgagagcctgatcgacctgcaggaactgggaaaatacgagcagtatatcaaatggccttggtacatctggctgggcttcatcgccgggctgatcgccatcgtgatggtgacaatcatgctgtgttgcatgacctcctgctgtagctgcctgaagggctgctgttcctgcggatcttgttgcaaatttgatgaagacgattctgagcccgtgctgaaaggcgtgaaactgcactatacatagccgccgctccagctttgcacgtttcgatcccaaaggccctttttagggccgaccattcattgcaaaaaaaaaaaaaaaaaaaaaaaaaaaaaagcatatgactaaaaaaaaaaaaaaaaaaaaaaaaaaaaaaaaaaaaaaaaaaaaaaaaaaaaaaaaaaaaaaaaaaaaaaaaaaaagaagagcgtttaaacacgtgatatctggcctcatgggccttcctttcactgcccgctttccagtcgggaaacctgtcgtgccagctgcattaacatggtcatagctgtttccttgcgtattgggcgctctccgcttcctcgctcactgactcgctgcgctcggtcgttcgggtaaagcctggggtgcctaatgagcaaaaggccagcaaaaggccaggaaccgtaaaaaggccgcgttgctggcgtttttccataggctccgcccccctgacgagcatcacaaaaatcgacgctcaagtcagaggtggcgaaacccgacaggactataaagataccaggcgtttccccctggaagctccctcgtgcgctctcctgttccgaccctgccgcttaccggatacctgtccgcctttctcccttcgggaagcgtggcgctttctcatagctcacgctgtaggtatctcagttcggtgtaggtcgttcgctccaagctgggctgtgtgcacgaaccccccgttcagcccgaccgctgcgccttatccggtaactatcgtcttgagtccaacccggtaagacacgacttatcgccactggcagcagccactggtaacaggattagcagagcgaggtatgtaggcggtgctacagagttcttgaagtggtggcctaactacggctacactagaagaacagtatttggtatctgcgctctgctgaagccagttaccttcggaaaaagagttggtagctcttgatccggcaaacaaaccaccgctggtagcggtggtttttttgtttgcaagcagcagattacgcgcagaaaaaaaggatctcaagaagatcctttgatcttttctacggggtctgacgctcagtggaacgaaaactcacgttaagggattttggtcatgaatacacggtgcctgactgcgttagcaatttaactgtgataaactaccgcattaaagcttatcgatgataagctgtcaaacatgagaattcttagaaaaactcatcgagcatcaaatgaaactgcaatttattcatatcaggattatcaataccatatttttgaaaaagccgtttctgtaatgaaggagaaaactcaccgaggcagttccataggatggcaagatcctggtatcggtctgcgattccgactcgtccaacatcaatacaacctattaatttcccctcgtcaaaaataaggttatcaagtgagaaatcaccatgagtgacgactgaatccggtgagaatggcaaaagcttatgcatttctttccagacttgttcaacaggccagccattacgctcgtcatcaaaatcactcgcatcaaccaaaccgttattcattcgtgattgcgcctgagcgagacgaaatacgcgatcgctgttaaaaggacaattacaaacaggaatcgaatgcaaccggcgcaggaacactgccagcgcatcaacaatattttcacctgaatcaggatattcttctaatacctggaatgctgttttcccggggatcgcagtggtgagtaaccatgcatcatcaggagtacggataaaatgcttgatggtcggaagaggcataaattccgtcagccagtttagtctgaccatctcatctgtaacatcattggcaacgctacctttgccatgtttcagaaacaactctggcgcatcgggcttcccatacaatcgatagattgtcgcacctgattgcccgacattatcgcgagcccatttatacccatataaatcagcatccatgttggaatttaatcgcggcctcgagcaagacgtttcccgttgaatatggctcataacaccccttgtattactgtttatgtaagcagacagttttattgttcatgagcggatacatatttgaatgtatttagaaaaataaacaaataggggttccgcgcacatttccccgaaaagtgccacctaaattgtaagcgttaatattttgttaaaattcgcgttaaatttttgttaaatcagctcattttttaaccaataggccgaaatcggcaaaatcccttataaatcaaaagaatagaccgagatagggttgagtggccgctacagggcgctcccattcgccattcaggctgcgcaactgttgggaagggcgtttcggtgcgggcctcttcgctattacgccagctggcgaaagggggatgtgctgcaaggcgattaagttgggtaacgccagggttttcccagtcac

SEQ ID NO: 102 - DNA, 6427 bp, synthetic construct
  source 1..6427: mol_type = other DNA
acgcgtgcctaaattaatacgactcactataaggagttccctatcactctctttaatcactactcacagtaacctcaactcctgccacaatgtttgtgttcctggtgctgctgccactggtgagctctcagtgcgtgaatctgaccacacggacccagctgcccccagcctacaccaactcttttacaaggggagtgtattaccctgacaaggtgtttagatccagcgtgctgcacagcacccaggacctgttcctgccattcttttccaatgtgacatggttccacgccatccacgtgtctggaaccaatggaaccaagagattcgacaaccccgtgctgccctttaatgatggcgtgtacttcgccagcaccgagaaaagcaatatcattcgcgggtggattttcggaaccacactggactctaagacccagagcctgctgattgtgaacaatgccaccaacgtggtgattaaggtgtgtgagtttcagttctgtaatgaccccttcctgggagtgtattaccacaagaacaataaatcctggatggaatccgagttccgcgtgtactcttccgccaacaattgcacatttgagtacgtgtcccagccttttctgatggacctggagggcaagcagggaaattttaagaatctgagagaatttgtgttcaagaacatcgacggctacttcaagatttattctaagcatacacctatcaatctggtgcgcgatctgccacaggggttcagcgccctggaacctctggtggatctgccaattggaatcaatatcacacgcttccagaccctgctggccctgcaccgctcctacctgacacccggcgattctagctctgggtggaccgccggagccgccgcctactatgtgggatacctgcagccccgcaccttcctgctgaagtataatgaaaacggcaccattaccgacgccgtggactgtgccctggacccactgagcgaaaccaagtgcacactgaaatccttcaccgtggaaaaagggatctaccagaccagcaacttccgcgtgcagcctaccgaaagcattgtgcgctttcccaatattacaaacctgtgtccatttggcgaggtgttcaacgccacacgcttcgccagcgtgtatgcctggaaccggaaaagaatcagcaactgtgtggccgattacagcgtgctgtacaatagcgcctctttttccacatttaaatgttacggggtgtcccctacaaagctgaatgacctgtgtttcaccaatgtgtatgccgacagcttcgtgattagaggcgacgaggtgcggcagatcgccccaggacagacaggcaaaattgccgattataactacaaactgccagatgactttaccgggtgcgtgatcgcctggaatagcaacaatctggacagcaaagtggggggcaattacaactatctgtacagactgtttcgcaagtctaacctgaaaccattcgagagggacattagcacagagatctatcaggccggatccacaccatgtaacggcgtggaaggctttaattgttactttcccctgcagtcctatgggtttcagccaacaaatggggtggggtatcagccctacagggtggtggtgctgtcctttgaactgctgcatgcccctgccaccgtgtgcgggcctaagaaatctaccaacctggtgaagaataaatgcgtgaatttcaatttcaatgggctgacagggacaggcgtgctgaccgaatccaataagaaatttctgccattccagcagtttgggagggacatcgccgacacaaccgacgccgtgagggatccacagaccctggaaatcctggatattacaccctgtagcttcggcggggtgtccgtgattacaccagggacaaatacatccaaccaggtggccgtgctgtatcaggacgtgaattgtaccgaagtgcccgtggccatccatgccgaccagctgacacctacctggagggtgtatagcaccggcagcaacgtgttccagacaagagccgggtgcctgattggcgccgagcacgtgaacaatagctatgaatgcgatatcccaatcggcgccgggatctgcgcctcctaccagacccagacaaattcccccagacgggccagatctgtggcctcccagtctattatcgcctataccatgtctctgggcgccgagaacagcgtggcctattctaacaattctattgccattcccacaaatttcacaattagcgtgaccacagaaatcctgcccgtgtctatgacaaagacctccgtggattgtacaatgtatatttgtggcgacagcacagagtgcagcaacctgctgctgcagtacggctctttctgcacacagctgaaccgcgccctgacaggtattgccgtggagcaggataaaaacacacaggaagtgtttgcccaggtgaagcagatttacaaaacaccacccattaaagacttcggcggattcaacttctcccagatcctgcctgaccccagcaaaccttccaagagaagctttatcgaggacctgctgtttaacaaagtgaccctggccgatgccggatttatcaaacagtacggggactgcctgggcgatattgccgccagagatctgatctgtgcccagaaattcaatgggctgaccgtgctgcctcccctgctgaccgacgagatgatcgcccagtacaccagcgccctgctggccggcacaatcacctctggctggaccttcggcgccggcgccgccctgcagatcccatttgccatgcagatggcctacagatttaatgggatcggggtgacacagaacgtgctgtatgagaatcagaagctgattgccaatcagttcaacagcgccatcgggaagattcaggacagcctgtctagcacagcctctgccctgggcaagctgcaggatgtggtgaaccagaacgcccaggccctgaataccctggtgaaacagctgtctagcaatttcggggccattagctccgtgctgaatgatatcctgagccgcctggatccacctgaggccgaagtgcagatcgacaggctgatcaccggccggctgcagagcctgcagacctatgtgacccagcagctgattagagccgccgagatccgggcctccgccaacctggccgccaccaagatgtctgaatgcgtgctgggccagtctaaacgtgtggatttttgtgggaaggggtaccatctgatgagctttccccagagcgccccccacggggtggtgttcctgcacgtgacatacgtgcctgcccaggaaaaaaattttacaaccgcccctgccatctgccacgacggaaaggcccattttccaagagagggcgtgttcgtgtctaacgggacccattggtttgtgacccagcggaacttttacgagccccagatcattaccacagataacacctttgtgagcggaaattgtgatgtggtgattggcattgtgaacaataccgtgtacgatccactgcagcctgagctggactctttcaaggaggaactggacaagtatttcaaaaatcacacatcccctgacgtggatctgggagacattagcgggattaacgcctctgtggtgaatatccagaaggagatcgaccggctgaacgaggtggccaagaatctgaatgagagcctgatcgacctgcaggaactgggaaaatacgagcagtatatcaaatggccttggtacatctggctgggcttcatcgccgggctgatcgccatcgtgatggtgacaatcatgctgtgttgcatgacctcctgctgtagctgcctgaagggctgctgttcctgcggatcttgttgcaaatttgatgaagacgattctgagcccgtgctgaaaggcgtgaaactgcactatacatagtaattaagtgcttcccacttaaaacatatcaggccttctatttatttaaatatttaaattttatatttattgttgaatgtatggtttgctacctattgtaactattattcttaatcttaaaactataaatatggatcttttatgattctttttgtaagccctaggggctctaaaatggtttcacttatttatcccaaaatttcattgcaaaaaaaaaaaaaaaaaaaaaaaaaaaaaagcatatgactaaaaaaaaaaaaaaaaaaaaaaaaaaaaaaaaaaaaaagaagagcgtttaaacacgtgatatctggcctcatgggccttcctttcactgcccgctttccagtcgggaaacctgtcgtgccagctgcattaacatggtcatagctgtttccttgcgtattgggcgctctccgcttcctcgctcactgactcgctgcgctcggtcgttcgggtaaagcctggggtgcctaatgagcaaaaggccagcaaaaggccaggaaccgtaaaaaggccgcgttgctggcgtttttccataggctccgcccccctgacgagcatcacaaaaatcgacgctcaagtcagaggtggcgaaacccgacaggactataaagataccaggcgtttccccctggaagctccctcgtgcgctctcctgttccgaccctgccgcttaccggatacctgtccgcctttctcccttcgggaagcgtggcgctttctcatagctcacgctgtaggtatctcagttcggtgtaggtcgttcgctccaagctgggctgtgtgcacgaaccccccgttcagcccgaccgctgcgccttatccggtaactatcgtcttgagtccaacccggtaagacacgacttatcgccactggcagcagccactggtaacaggattagcagagcgaggtatgtaggcggtgctacagagttcttgaagtggtggcctaactacggctacactagaagaacagtatttggtatctgcgctctgctgaagccagttaccttcggaaaaagagttggtagctcttgatccggcaaacaaaccaccgctggtagcggtggtttttttgtttgcaagcagcagattacgcgcagaaaaaaaggatctcaagaagatcctttgatcttttctacggggtctgacgctcagtggaacgaaaactcacgttaagggattttggtcatgaatacacggtgcctgactgcgttagcaatttaactgtgataaactaccgcattaaagcttatcgatgataagctgtcaaacatgagaattcttagaaaaactcatcgagcatcaaatgaaactgcaatttattcatatcaggattatcaataccatatttttgaaaaagccgtttctgtaatgaaggagaaaactcaccgaggcagttccataggatggcaagatcctggtatcggtctgcgattccgactcgtccaacatcaatacaacctattaatttcccctcgtcaaaaataaggttatcaagtgagaaatcaccatgagtgacgactgaatccggtgagaatggcaaaagcttatgcatttctttccagacttgttcaacaggccagccattacgctcgtcatcaaaatcactcgcatcaaccaaaccgttattcattcgtgattgcgcctgagcgagacgaaatacgcgatcgctgttaaaaggacaattacaaacaggaatcgaatgcaaccggcgcaggaacactgccagcgcatcaacaatattttcacctgaatcaggatattcttctaatacctggaatgctgttttcccggggatcgcagtggtgagtaaccatgcatcatcaggagtacggataaaatgcttgatggtcggaagaggcataaattccgtcagccagtttagtctgaccatctcatctgtaacatcattggcaacgctacctttgccatgtttcagaaacaactctggcgcatcgggcttcccatacaatcgatagattgtcgcacctgattgcccgacattatcgcgagcccatttatacccatataaatcagcatccatgttggaatttaatcgcggcctcgagcaagacgtttcccgttgaatatggctcataacaccccttgtattactgtttatgtaagcagacagttttattgttcatgagcggatacatatttgaatgtatttagaaaaataaacaaataggggttccgcgcacatttccccgaaaagtgccacctaaattgtaagcgttaatattttgttaaaattcgcgttaaatttttgttaaatcagctcattttttaaccaataggccgaaatcggcaaaatcccttataaatcaaaagaatagaccgagatagggttgagtggccgctacagggcgctcccattcgccattcaggctgcgcaactgttgggaagggcgtttcggtgcgggcctcttcgctattacgccagctggcgaaagggggatgtgctgcaaggcgattaagttgggtaacgccagggttttcccagtcac

SEQ ID NO: 103 - DNA, 6412 bp, synthetic construct
  source 1..6412: mol_type = other DNA
acgcgtaatacgactcactataggggaaataagagagaaaagaagagtaagaagaaatataagaccccggcgccgccaccatgtttgtttttcttgttcttctgccattggtgtcttcccaatgtgtgaacttgactacccgcacacagctcccgccggcgtacactaactccttcacccggggggtttactacccggacaaagtgttccgcagcagtgtcctgcattcaacacaagatttgttccttccattctttagcaatgtcacttggttccatgctatacacgtgagtggcactaacggcactaagcgcttcgataacccggttctgccgtttaatgatggcgtttacttcgcaagtactgagaaatcaaacattatacgggggtggatattcggtactacattggatagtaaaactcaaagccttttgattgtcaacaatgcaactaatgtagtcataaaagtttgtgaattccaattctgtaacgatccctttcttggtgtgtattaccacaagaataacaaatcatggatggagtctgaatttcgagtatacagtagcgccaataattgcacgtttgagtatgtaagccagccgtttctgatggacttggaaggaaagcaaggcaactttaagaacctcagggagttcgtattcaaaaatatagacggttacttcaagatttactcaaaacatacacctatcaacttggtccgagatctcccacaaggtttttcagcgctcgagccattggtggacctgcccatcggaatcaacattacccgattccagacactgcttgcactgcaccggagttatctcacacccggcgacagctcgtctggttggacggcgggagctgccgcttactatgtcggttacttgcaacctcggacatttcttctgaagtataacgaaaacggtacgatcaccgatgccgtagactgcgctctcgatcccctttcagagacgaagtgcacgctcaaatcatttactgtggaaaaaggaatttatcaaacgagcaatttcagggtgcaacccacggagtccatcgtacgattcccaaacataacaaatctttgcccgtttggcgaggtttttaatgctacgcgctttgcatcagtgtacgcttggaataggaaacgaatctcaaattgtgttgcggattattccgtgttgtataattccgcaagcttctccacctttaaatgttatggcgtgtcccccacaaaacttaacgatctttgctttacaaatgtctatgcggattcattcgttatccgaggggatgaagtgcgacaaatcgctcctgggcagacagggaagatagctgattacaattacaaacttccagacgattttacaggatgtgtaatcgcgtggaactcaaacaatttggacagtaaggttggtggcaactacaattatctgtatagacttttcagaaaaagtaacctcaaacctttcgaacgcgacattagcactgagatataccaggccggatcaactccttgtaacggtgttgaaggtttcaactgttactttccgctccaatcctacggctttcaaccaacgaacggtgtcgggtaccaaccatacagagttgtcgtcttgagttttgagcttttgcacgcacctgcaaccgtgtgtggtccgaagaaaagtactaatctggttaaaaataaatgcgtcaatttcaactttaatgggttgacgggcacaggcgtgctgacagagtccaataaaaagtttttgccctttcagcagtttgggagggacatcgccgatacgaccgatgccgtccgagatcctcaaacccttgaaatattggacattaccccctgtagttttggcggtgtaagtgtgattactcccggaacgaatacatctaaccaggtagcggtgctttatcaagatgtcaactgtacagaggtccccgtggcgattcacgccgatcagttgacacccacatggagggtttacagcacaggatccaacgtcttccagacgagagcaggatgcttgatcggtgccgagcatgtgaataacagctacgaatgtgacattccgattggtgctggaatctgcgcaagttaccaaactcaaacgaattcccctggctccgcctcctctgtggcatcccagtctataatcgcgtatacgatgtcactgggcgccgagaattctgtcgcatatagcaacaactccatcgcaatacccacaaattttacaatttctgtgaccacggaaattctgcccgtcagcatgacaaaaactagcgtggactgcacgatgtatatctgcggcgactccacagagtgttccaacctcctcttgcaatatggcagcttttgcacacaattgaaccgagcgctcaccgggatagcggtcgagcaagataagaatacccaagaggtgtttgcccaggtgaagcaaatctataagacccctccaataaaggattttggcggcttcaatttctcacaaattttgcccgatccatctaagccgtccaagcgatcatttattgaggatctgctgttcaacaaagtcactctcgccgacgcggggtttattaaacaatatggcgattgcctgggcgacatcgccgccagggaccttatatgcgcccagaagttcaacggtctcaccgtgctgccaccattgttgactgacgaaatgatcgcacagtatacgtcagcgctgctggctggtaccattacttctggctggacattcggagccggtgcagcccttcagattccatttgcaatgcagatggcctatagatttaatggaataggagtgacgcagaacgtattgtacgagaatcaaaagttgatcgcaaaccagttcaattctgccattggaaagatacaagattccctttcttctaccgcctcagccctgggtaagttgcaagatgtcgtcaaccaaaatgcacaggctttgaataccttggtaaaacaattgtcatccaatttcggcgccataagctcagtacttaacgatatcttgtcacgattggatccccccgaagccgaggtccaaatcgataggctcatcacgggacggctccagagccttcaaacctatgtgacgcaacaactgatacgggccgcagaaatccgagcgtccgccaacttggcagctaccaagatgtccgaatgtgtactgggtcaatcaaagagagttgatttctgtggaaaaggataccatctcatgtcattcccccaaagcgccccgcacggcgtcgtgttcctccatgtgacttacgttccagcacaagaaaaaaacttcacaactgcgcccgctatctgccatgacgggaaggcgcacttcccacgagagggtgtatttgtgtcaaatggaacgcactggttcgtaacgcaaaggaacttctatgaaccgcagataatcacgactgacaacacttttgtatctggcaattgtgatgtggtcatcgggatagttaacaacactgtctatgacccgctgcaacccgagcttgattcatttaaagaagaactcgataaatatttcaagaatcacaccagtcccgatgtggaccttggagacatttccgggataaatgcctctgtggtaaacatccaaaaggaaatcgatcggctgaatgaagtggccaaaaacttgaacgaaagtctgatagaccttcaggagctcgggaagtatgaacaatacataaagtggccatggtacatctggcttgggttcatcgctggcctcatagccatcgttatggttaccatcatgctctgctgtatgacttcctgttgttcctgtctcaaagggtgttgcagctgtggtagctgctgcaaatttgacgaggatgactcagaacccgtcttgaagggagtcaagttgcactacacttagtaatctagacggcgcgcccacccagcggccgctgataataggctggagcctcggtggccatgcttcttgccccttgggcctccccccagcccctcctccccttcctgcacccgtacccccgtggtctttgaataaagtctgattttcattgcaaaaaaaaaaaaaaaaaaaaaaaaaaaaaagcatatgactaaaaaaaaaaaaaaaaaaaaaaaaaaaaaaaaaaaaaaaaaaaaaaaaaaaaaaaaaaaaaaaaaaaaaaaaaaaaaaaaaaaaaaaagaagagcgtttaaacacgtgatatctggcctcatgggccttcctttcactgcccgctttccagtcgggaaacctgtcgtgccagctgcattaacatggtcatagctgtttccttgcgtattgggcgctctccgcttcctcgctcactgactcgctgcgctcggtcgttcgggtaaagcctggggtgcctaatgagcaaaaggccagcaaaaggccaggaaccgtaaaaaggccgcgttgctggcgtttttccataggctccgcccccctgacgagcatcacaaaaatcgacgctcaagtcagaggtggcgaaacccgacaggactataaagataccaggcgtttccccctggaagctccctcgtgcgctctcctgttccgaccctgccgcttaccggatacctgtccgcctttctcccttcgggaagcgtggcgctttctcatagctcacgctgtaggtatctcagttcggtgtaggtcgttcgctccaagctgggctgtgtgcacgaaccccccgttcagcccgaccgctgcgccttatccggtaactatcgtcttgagtccaacccggtaagacacgacttatcgccactggcagcagccactggtaacaggattagcagagcgaggtatgtaggcggtgctacagagttcttgaagtggtggcctaactacggctacactagaagaacagtatttggtatctgcgctctgctgaagccagttaccttcggaaaaagagttggtagctcttgatccggcaaacaaaccaccgctggtagcggtggtttttttgtttgcaagcagcagattacgcgcagaaaaaaaggatctcaagaagatcctttgatcttttctacggggtctgacgctcagtggaacgaaaactcacgttaagggattttggtcatgaatacacggtgcctgactgcgttagcaatttaactgtgataaactaccgcattaaagcttatcgatgataagctgtcaaacatgagaattcttagaaaaactcatcgagcatcaaatgaaactgcaatttattcatatcaggattatcaataccatatttttgaaaaagccgtttctgtaatgaaggagaaaactcaccgaggcagttccataggatggcaagatcctggtatcggtctgcgattccgactcgtccaacatcaatacaacctattaatttcccctcgtcaaaaataaggttatcaagtgagaaatcaccatgagtgacgactgaatccggtgagaatggcaaaagcttatgcatttctttccagacttgttcaacaggccagccattacgctcgtcatcaaaatcactcgcatcaaccaaaccgttattcattcgtgattgcgcctgagcgagacgaaatacgcgatcgctgttaaaaggacaattacaaacaggaatcgaatgcaaccggcgcaggaacactgccagcgcatcaacaatattttcacctgaatcaggatattcttctaatacctggaatgctgttttcccggggatcgcagtggtgagtaaccatgcatcatcaggagtacggataaaatgcttgatggtcggaagaggcataaattccgtcagccagtttagtctgaccatctcatctgtaacatcattggcaacgctacctttgccatgtttcagaaacaactctggcgcatcgggcttcccatacaatcgatagattgtcgcacctgattgcccgacattatcgcgagcccatttatacccatataaatcagcatccatgttggaatttaatcgcggcctcgagcaagacgtttcccgttgaatatggctcataacaccccttgtattactgtttatgtaagcagacagttttattgttcatgagcggatacatatttgaatgtatttagaaaaataaacaaataggggttccgcgcacatttccccgaaaagtgccacctaaattgtaagcgttaatattttgttaaaattcgcgttaaatttttgttaaatcagctcattttttaaccaataggccgaaatcggcaaaatcccttataaatcaaaagaatagaccgagatagggttgagtggccgctacagggcgctcccattcgccattcaggctgcgcaactgttgggaagggcgtttcggtgcgggcctcttcgctattacgccagctggcgaaagggggatgtgctgcaaggcgattaagttgggtaacgccagggttttcccagtcac

SEQ ID NO: 104 - DNA, 4487 bp, synthetic construct
  source 1..4487: mol_type = other DNA
acgcgtaatacgactcactatagtatattagtgctaatttccctccgtttgtcctagcttttctcttctgtcaaccccacacgcctttggcacaatggaagatgccaaaaacattaagaagggcccagcgccattctacccactcgaagacgggaccgccggcgagcagctgcacaaagccatgaagcgctacgccctggtgcccggcaccatcgcctttaccgacgcacatatcgaggtggacattacctacgccgagtacttcgagatgagcgttcggctggcagaagctatgaagcgctatgggctgaatacaaaccatcggatcgtggtgtgcagcgagaatagcttgcagttcttcatgcccgtgttgggtgccctgttcatcggtgtggctgtggccccagctaacgacatctacaacgagcgcgagctgctgaacagcatgggcatcagccagcccaccgtcgtattcgtgagcaagaaagggctgcaaaagatcctcaacgtgcaaaagaagctaccgatcatacaaaagatcatcatcatggatagcaagaccgactaccagggcttccaaagcatgtacaccttcgtgacttcccatttgccacccggcttcaacgagtacgacttcgtgcccgagagcttcgaccgggacaaaaccatcgccctgatcatgaacagtagtggcagtaccggattgcccaagggcgtagccctaccgcaccgcaccgcttgtgtccgattcagtcatgcccgcgaccccatcttcggcaaccagatcatccccgacaccgctatcctcagcgtggtgccatttcaccacggcttcggcatgttcaccacgctgggctacttgatctgcggctttcgggtcgtgctcatgtaccgcttcgaggaggagctattcttgcgcagcttgcaagactataagattcaatctgccctgctggtgcccacactatttagcttcttcgctaagagcactctcatcgacaagtacgacctaagcaacttgcacgagatcgccagcggcggggcgccgctcagcaaggaggtaggtgaggccgtggccaaacgcttccacctaccaggcatccgccagggctacggcctgacagaaacaaccagcgccattctgatcacccccgaaggggacgacaagcctggcgcagtaggcaaggtggtgcccttcttcgaggctaaggtggtggacttggacaccggtaagacactgggtgtgaaccagcgcggcgagctgtgcgtccgtggccccatgatcatgagcggctacgttaacaaccccgaggctacaaacgctctcatcgacaaggacggctggctgcacagcggcgacatcgcctactgggacgaggacgagcacttcttcatcgtggaccggctgaaaagcctgatcaaatacaagggctaccaggtagccccagccgaactggagagcatcctgctgcaacaccccaacatcttcgacgccggggtcgccggcctgcccgacgacgatgccggcgagctgcccgccgcagtcgtcgtgctggaacacggtaaaaccatgaccgagaaggagatcgtggactatgtggccagccaggttacaaccgccaagaagctgcgcggtggtgttgtgttcgtggacgaggtgcctaaaggactgaccggcaagttggacgcccgcaagatccgcgagattctcattaaggccaagaagggcggcaagatcgccgtgtaatctagacggcgcgcccacccagcggccgccatcacatttaaaagcatctcagcctaccatgagaataagagaaagaaaatgaagatcaaaagcttattcatctgtttttctttttcgttggtgtaaagccaacaccctgtctaaaaaacataaatttctttaatcattttgcctcttttctctgtgcttcaattaataaaaaatggaaagaatctaatagagtggtacagcactgttatttttcaaagatgtgttgctatcctgaaaattctgtaggttctgtggaagttccagtgttctctcttattccacttcggtagaggatttctagtttcttgtgggctaattaaataaatcattaatactcttctattttcattgcaaaaaaaaaaaaaaaaaaaaaaaaaaaaaagcatatgactaaaaaaaaaaaaaaaaaaaaaaaaaaaaaaaaaaaaaaaaaaaaaaaaaaaaaaaaaaaaaaaaaaaaaaaaaaaaaaaaaaaaaaaagaagagcgtttaaacacgtgatatctggcctcatgggccttcctttcactgcccgctttccagtcgggaaacctgtcgtgccagctgcattaacatggtcatagctgtttccttgcgtattgggcgctctccgcttcctcgctcactgactcgctgcgctcggtcgttcgggtaaagcctggggtgcctaatgagcaaaaggccagcaaaaggccaggaaccgtaaaaaggccgcgttgctggcgtttttccataggctccgcccccctgacgagcatcacaaaaatcgacgctcaagtcagaggtggcgaaacccgacaggactataaagataccaggcgtttccccctggaagctccctcgtgcgctctcctgttccgaccctgccgcttaccggatacctgtccgcctttctcccttcgggaagcgtggcgctttctcatagctcacgctgtaggtatctcagttcggtgtaggtcgttcgctccaagctgggctgtgtgcacgaaccccccgttcagcccgaccgctgcgccttatccggtaactatcgtcttgagtccaacccggtaagacacgacttatcgccactggcagcagccactggtaacaggattagcagagcgaggtatgtaggcggtgctacagagttcttgaagtggtggcctaactacggctacactagaagaacagtatttggtatctgcgctctgctgaagccagttaccttcggaaaaagagttggtagctcttgatccggcaaacaaaccaccgctggtagcggtggtttttttgtttgcaagcagcagattacgcgcagaaaaaaaggatctcaagaagatcctttgatcttttctacggggtctgacgctcagtggaacgaaaactcacgttaagggattttggtcatgaatacacggtgcctgactgcgttagcaatttaactgtgataaactaccgcattaaagcttatcgatgataagctgtcaaacatgagaattcttagaaaaactcatcgagcatcaaatgaaactgcaatttattcatatcaggattatcaataccatatttttgaaaaagccgtttctgtaatgaaggagaaaactcaccgaggcagttccataggatggcaagatcctggtatcggtctgcgattccgactcgtccaacatcaatacaacctattaatttcccctcgtcaaaaataaggttatcaagtgagaaatcaccatgagtgacgactgaatccggtgagaatggcaaaagcttatgcatttctttccagacttgttcaacaggccagccattacgctcgtcatcaaaatcactcgcatcaaccaaaccgttattcattcgtgattgcgcctgagcgagacgaaatacgcgatcgctgttaaaaggacaattacaaacaggaatcgaatgcaaccggcgcaggaacactgccagcgcatcaacaatattttcacctgaatcaggatattcttctaatacctggaatgctgttttcccggggatcgcagtggtgagtaaccatgcatcatcaggagtacggataaaatgcttgatggtcggaagaggcataaattccgtcagccagtttagtctgaccatctcatctgtaacatcattggcaacgctacctttgccatgtttcagaaacaactctggcgcatcgggcttcccatacaatcgatagattgtcgcacctgattgcccgacattatcgcgagcccatttatacccatataaatcagcatccatgttggaatttaatcgcggcctcgagcaagacgtttcccgttgaatatggctcataacaccccttgtattactgtttatgtaagcagacagttttattgttcatgagcggatacatatttgaatgtatttagaaaaataaacaaataggggttccgcgcacatttccccgaaaagtgccacctaaattgtaagcgttaatattttgttaaaattcgcgttaaatttttgttaaatcagctcattttttaaccaataggccgaaatcggcaaaatcccttataaatcaaaagaatagaccgagatagggttgagtggccgctacagggcgctcccattcgccattcaggctgcgcaactgttgggaagggcgtttcggtgcgggcctcttcgctattacgccagctggcgaaagggggatgtgctgcaaggcgattaagttgggtaacgccagggttttcccagtcac

SEQ ID NO: 105 - DNA, 4321 bp, synthetic construct
  source 1..4321: mol_type = other DNA
acgcgtaatacgactcactatagttcacccaatggacctgcctactgcagcgtaggcctcgcctcaacggcaggagagcaggcggctgcggttgctgcagccttcagtctccacccggactacgcatggaagatgccaaaaacattaagaagggcccagcgccattctacccactcgaagacgggaccgccggcgagcagctgcacaaagccatgaagcgctacgccctggtgcccggcaccatcgcctttaccgacgcacatatcgaggtggacattacctacgccgagtacttcgagatgagcgttcggctggcagaagctatgaagcgctatgggctgaatacaaaccatcggatcgtggtgtgcagcgagaatagcttgcagttcttcatgcccgtgttgggtgccctgttcatcggtgtggctgtggccccagctaacgacatctacaacgagcgcgagctgctgaacagcatgggcatcagccagcccaccgtcgtattcgtgagcaagaaagggctgcaaaagatcctcaacgtgcaaaagaagctaccgatcatacaaaagatcatcatcatggatagcaagaccgactaccagggcttccaaagcatgtacaccttcgtgacttcccatttgccacccggcttcaacgagtacgacttcgtgcccgagagcttcgaccgggacaaaaccatcgccctgatcatgaacagtagtggcagtaccggattgcccaagggcgtagccctaccgcaccgcaccgcttgtgtccgattcagtcatgcccgcgaccccatcttcggcaaccagatcatccccgacaccgctatcctcagcgtggtgccatttcaccacggcttcggcatgttcaccacgctgggctacttgatctgcggctttcgggtcgtgctcatgtaccgcttcgaggaggagctattcttgcgcagcttgcaagactataagattcaatctgccctgctggtgcccacactatttagcttcttcgctaagagcactctcatcgacaagtacgacctaagcaacttgcacgagatcgccagcggcggggcgccgctcagcaaggaggtaggtgaggccgtggccaaacgcttccacctaccaggcatccgccagggctacggcctgacagaaacaaccagcgccattctgatcacccccgaaggggacgacaagcctggcgcagtaggcaaggtggtgcccttcttcgaggctaaggtggtggacttggacaccggtaagacactgggtgtgaaccagcgcggcgagctgtgcgtccgtggccccatgatcatgagcggctacgttaacaaccccgaggctacaaacgctctcatcgacaaggacggctggctgcacagcggcgacatcgcctactgggacgaggacgagcacttcttcatcgtggaccggctgaaaagcctgatcaaatacaagggctaccaggtagccccagccgaactggagagcatcctgctgcaacaccccaacatcttcgacgccggggtcgccggcctgcccgacgacgatgccggcgagctgcccgccgcagtcgtcgtgctggaacacggtaaaaccatgaccgagaaggagatcgtggactatgtggccagccaggttacaaccgccaagaagctgcgcggtggtgttgtgttcgtggacgaggtgcctaaaggactgaccggcaagttggacgcccgcaagatccgcgagattctcattaaggccaagaagggcggcaagatcgccgtgtaatctagacggcgcgcccacccagcggccgcgggtctttgtcctctgtactgtctctctccttgcccctaacccaaaaagcttcatttttctgtgtaggctgcacaagagccttgattgaagatatattctttctgaacagtatttaaggtttccaataaaatgtacacccctcagattttcattgcaaaaaaaaaaaaaaaaaaaaaaaaaaaaaagcatatgactaaaaaaaaaaaaaaaaaaaaaaaaaaaaaaaaaaaaaaaaaaaaaaaaaaaaaaaaaaaaaaaaaaaaaaaaaaaaaaaaaaaaaaaagaagagcgtttaaacacgtgatatctggcctcatgggccttcctttcactgcccgctttccagtcgggaaacctgtcgtgccagctgcattaacatggtcatagctgtttccttgcgtattgggcgctctccgcttcctcgctcactgactcgctgcgctcggtcgttcgggtaaagcctggggtgcctaatgagcaaaaggccagcaaaaggccaggaaccgtaaaaaggccgcgttgctggcgtttttccataggctccgcccccctgacgagcatcacaaaaatcgacgctcaagtcagaggtggcgaaacccgacaggactataaagataccaggcgtttccccctggaagctccctcgtgcgctctcctgttccgaccctgccgcttaccggatacctgtccgcctttctcccttcgggaagcgtggcgctttctcatagctcacgctgtaggtatctcagttcggtgtaggtcgttcgctccaagctgggctgtgtgcacgaaccccccgttcagcccgaccgctgcgccttatccggtaactatcgtcttgagtccaacccggtaagacacgacttatcgccactggcagcagccactggtaacaggattagcagagcgaggtatgtaggcggtgctacagagttcttgaagtggtggcctaactacggctacactagaagaacagtatttggtatctgcgctctgctgaagccagttaccttcggaaaaagagttggtagctcttgatccggcaaacaaaccaccgctggtagcggtggtttttttgtttgcaagcagcagattacgcgcagaaaaaaaggatctcaagaagatcctttgatcttttctacggggtctgacgctcagtggaacgaaaactcacgttaagggattttggtcatgaatacacggtgcctgactgcgttagcaatttaactgtgataaactaccgcattaaagcttatcgatgataagctgtcaaacatgagaattcttagaaaaactcatcgagcatcaaatgaaactgcaatttattcatatcaggattatcaataccatatttttgaaaaagccgtttctgtaatgaaggagaaaactcaccgaggcagttccataggatggcaagatcctggtatcggtctgcgattccgactcgtccaacatcaatacaacctattaatttcccctcgtcaaaaataaggttatcaagtgagaaatcaccatgagtgacgactgaatccggtgagaatggcaaaagcttatgcatttctttccagacttgttcaacaggccagccattacgctcgtcatcaaaatcactcgcatcaaccaaaccgttattcattcgtgattgcgcctgagcgagacgaaatacgcgatcgctgttaaaaggacaattacaaacaggaatcgaatgcaaccggcgcaggaacactgccagcgcatcaacaatattttcacctgaatcaggatattcttctaatacctggaatgctgttttcccggggatcgcagtggtgagtaaccatgcatcatcaggagtacggataaaatgcttgatggtcggaagaggcataaattccgtcagccagtttagtctgaccatctcatctgtaacatcattggcaacgctacctttgccatgtttcagaaacaactctggcgcatcgggcttcccatacaatcgatagattgtcgcacctgattgcccgacattatcgcgagcccatttatacccatataaatcagcatccatgttggaatttaatcgcggcctcgagcaagacgtttcccgttgaatatggctcataacaccccttgtattactgtttatgtaagcagacagttttattgttcatgagcggatacatatttgaatgtatttagaaaaataaacaaataggggttccgcgcacatttccccgaaaagtgccacctaaattgtaagcgttaatattttgttaaaattcgcgttaaatttttgttaaatcagctcattttttaaccaataggccgaaatcggcaaaatcccttataaatcaaaagaatagaccgagatagggttgagtggccgctacagggcgctcccattcgccattcaggctgcgcaactgttgggaagggcgtttcggtgcgggcctcttcgctattacgccagctggcgaaagggggatgtgctgcaaggcgattaagttgggtaacgccagggttttcccagtcac

SEQ ID NO: 106 - DNA, 4568 bp, synthetic construct
  source 1..4568: mol_type = other DNA
acgcgtaatacgactcactatagagaacgcccccaaaatctgtttctaattttacagaaatcttttgaaacttggcacggtattcaaaagtccgtggaaagaaaaaaaccttgtcctggcttcagcttccaactacaaagacagacttggtccttttcaacggttttcacagatccagtgacccacgctctgaagacagaattagctaactttcaaaaacatctggaaaaatggaagatgccaaaaacattaagaagggcccagcgccattctacccactcgaagacgggaccgccggcgagcagctgcacaaagccatgaagcgctacgccctggtgcccggcaccatcgcctttaccgacgcacatatcgaggtggacattacctacgccgagtacttcgagatgagcgttcggctggcagaagctatgaagcgctatgggctgaatacaaaccatcggatcgtggtgtgcagcgagaatagcttgcagttcttcatgcccgtgttgggtgccctgttcatcggtgtggctgtggccccagctaacgacatctacaacgagcgcgagctgctgaacagcatgggcatcagccagcccaccgtcgtattcgtgagcaagaaagggctgcaaaagatcctcaacgtgcaaaagaagctaccgatcatacaaaagatcatcatcatggatagcaagaccgactaccagggcttccaaagcatgtacaccttcgtgacttcccatttgccacccggcttcaacgagtacgacttcgtgcccgagagcttcgaccgggacaaaaccatcgccctgatcatgaacagtagtggcagtaccggattgcccaagggcgtagccctaccgcaccgcaccgcttgtgtccgattcagtcatgcccgcgaccccatcttcggcaaccagatcatccccgacaccgctatcctcagcgtggtgccatttcaccacggcttcggcatgttcaccacgctgggctacttgatctgcggctttcgggtcgtgctcatgtaccgcttcgaggaggagctattcttgcgcagcttgcaagactataagattcaatctgccctgctggtgcccacactatttagcttcttcgctaagagcactctcatcgacaagtacgacctaagcaacttgcacgagatcgccagcggcggggcgccgctcagcaaggaggtaggtgaggccgtggccaaacgcttccacctaccaggcatccgccagggctacggcctgacagaaacaaccagcgccattctgatcacccccgaaggggacgacaagcctggcgcagtaggcaaggtggtgcccttcttcgaggctaaggtggtggacttggacaccggtaagacactgggtgtgaaccagcgcggcgagctgtgcgtccgtggccccatgatcatgagcggctacgttaacaaccccgaggctacaaacgctctcatcgacaaggacggctggctgcacagcggcgacatcgcctactgggacgaggacgagcacttcttcatcgtggaccggctgaaaagcctgatcaaatacaagggctaccaggtagccccagccgaactggagagcatcctgctgcaacaccccaacatcttcgacgccggggtcgccggcctgcccgacgacgatgccggcgagctgcccgccgcagtcgtcgtgctggaacacggtaaaaccatgaccgagaaggagatcgtggactatgtggccagccaggttacaaccgccaagaagctgcgcggtggtgttgtgttcgtggacgaggtgcctaaaggactgaccggcaagttggacgcccgcaagatccgcgagattctcattaaggccaagaagggcggcaagatcgccgtgtaatctagacggcgcgcccacccagcggccgcaaacgatgcagatgcaagcctgtatcagaatctgaaaaccttatataaacccctcagacagtttgcttattttattttttatgttgtaaaatgctagtataaacaaacaaattaatgttgttctaaaggctgttaaaaaaaagatgaggactcagaagttcaagctaaatattgtttacattttctggtactctgtgaaagaagagaaaagggagtcatgcattttgctttggacacagtgttttatcacctgttcatttgaagaaaaataataaagtcagaagttcattttcattgcaaaaaaaaaaaaaaaaaaaaaaaaaaaaaagcatatgactaaaaaaaaaaaaaaaaaaaaaaaaaaaaaaaaaaaaaaaaaaaaaaaaaaaaaaaaaaaaaaaaaaaaaaaaaaaaaaaaaaaaaaaagaagagcgtttaaacacgtgatatctggcctcatgggccttcctttcactgcccgctttccagtcgggaaacctgtcgtgccagctgcattaacatggtcatagctgtttccttgcgtattgggcgctctccgcttcctcgctcactgactcgctgcgctcggtcgttcgggtaaagcctggggtgcctaatgagcaaaaggccagcaaaaggccaggaaccgtaaaaaggccgcgttgctggcgtttttccataggctccgcccccctgacgagcatcacaaaaatcgacgctcaagtcagaggtggcgaaacccgacaggactataaagataccaggcgtttccccctggaagctccctcgtgcgctctcctgttccgaccctgccgcttaccggatacctgtccgcctttctcccttcgggaagcgtggcgctttctcatagctcacgctgtaggtatctcagttcggtgtaggtcgttcgctccaagctgggctgtgtgcacgaaccccccgttcagcccgaccgctgcgccttatccggtaactatcgtcttgagtccaacccggtaagacacgacttatcgccactggcagcagccactggtaacaggattagcagagcgaggtatgtaggcggtgctacagagttcttgaagtggtggcctaactacggctacactagaagaacagtatttggtatctgcgctctgctgaagccagttaccttcggaaaaagagttggtagctcttgatccggcaaacaaaccaccgctggtagcggtggtttttttgtttgcaagcagcagattacgcgcagaaaaaaaggatctcaagaagatcctttgatcttttctacggggtctgacgctcagtggaacgaaaactcacgttaagggattttggtcatgaatacacggtgcctgactgcgttagcaatttaactgtgataaactaccgcattaaagcttatcgatgataagctgtcaaacatgagaattcttagaaaaactcatcgagcatcaaatgaaactgcaatttattcatatcaggattatcaataccatatttttgaaaaagccgtttctgtaatgaaggagaaaactcaccgaggcagttccataggatggcaagatcctggtatcggtctgcgattccgactcgtccaacatcaatacaacctattaatttcccctcgtcaaaaataaggttatcaagtgagaaatcaccatgagtgacgactgaatccggtgagaatggcaaaagcttatgcatttctttccagacttgttcaacaggccagccattacgctcgtcatcaaaatcactcgcatcaaccaaaccgttattcattcgtgattgcgcctgagcgagacgaaatacgcgatcgctgttaaaaggacaattacaaacaggaatcgaatgcaaccggcgcaggaacactgccagcgcatcaacaatattttcacctgaatcaggatattcttctaatacctggaatgctgttttcccggggatcgcagtggtgagtaaccatgcatcatcaggagtacggataaaatgcttgatggtcggaagaggcataaattccgtcagccagtttagtctgaccatctcatctgtaacatcattggcaacgctacctttgccatgtttcagaaacaactctggcgcatcgggcttcccatacaatcgatagattgtcgcacctgattgcccgacattatcgcgagcccatttatacccatataaatcagcatccatgttggaatttaatcgcggcctcgagcaagacgtttcccgttgaatatggctcataacaccccttgtattactgtttatgtaagcagacagttttattgttcatgagcggatacatatttgaatgtatttagaaaaataaacaaataggggttccgcgcacatttccccgaaaagtgccacctaaattgtaagcgttaatattttgttaaaattcgcgttaaatttttgttaaatcagctcattttttaaccaataggccgaaatcggcaaaatcccttataaatcaaaagaatagaccgagatagggttgagtggccgctacagggcgctcccattcgccattcaggctgcgcaactgttgggaagggcgtttcggtgcgggcctcttcgctattacgccagctggcgaaagggggatgtgctgcaaggcgattaagttgggtaacgccagggttttcccagtcac

SEQ ID NO: 107 - DNA, 4157 bp, synthetic construct
  source 1..4157: mol_type = other DNA
acgcgtaatacgactcactatagagaagctgtctatcgggctccagcggtcatggaagatgccaaaaacattaagaagggcccagcgccattctacccactcgaagacgggaccgccggcgagcagctgcacaaagccatgaagcgctacgccctggtgcccggcaccatcgcctttaccgacgcacatatcgaggtggacattacctacgccgagtacttcgagatgagcgttcggctggcagaagctatgaagcgctatgggctgaatacaaaccatcggatcgtggtgtgcagcgagaatagcttgcagttcttcatgcccgtgttgggtgccctgttcatcggtgtggctgtggccccagctaacgacatctacaacgagcgcgagctgctgaacagcatgggcatcagccagcccaccgtcgtattcgtgagcaagaaagggctgcaaaagatcctcaacgtgcaaaagaagctaccgatcatacaaaagatcatcatcatggatagcaagaccgactaccagggcttccaaagcatgtacaccttcgtgacttcccatttgccacccggcttcaacgagtacgacttcgtgcccgagagcttcgaccgggacaaaaccatcgccctgatcatgaacagtagtggcagtaccggattgcccaagggcgtagccctaccgcaccgcaccgcttgtgtccgattcagtcatgcccgcgaccccatcttcggcaaccagatcatccccgacaccgctatcctcagcgtggtgccatttcaccacggcttcggcatgttcaccacgctgggctacttgatctgcggctttcgggtcgtgctcatgtaccgcttcgaggaggagctattcttgcgcagcttgcaagactataagattcaatctgccctgctggtgcccacactatttagcttcttcgctaagagcactctcatcgacaagtacgacctaagcaacttgcacgagatcgccagcggcggggcgccgctcagcaaggaggtaggtgaggccgtggccaaacgcttccacctaccaggcatccgccagggctacggcctgacagaaacaaccagcgccattctgatcacccccgaaggggacgacaagcctggcgcagtaggcaaggtggtgcccttcttcgaggctaaggtggtggacttggacaccggtaagacactgggtgtgaaccagcgcggcgagctgtgcgtccgtggccccatgatcatgagcggctacgttaacaaccccgaggctacaaacgctctcatcgacaaggacggctggctgcacagcggcgacatcgcctactgggacgaggacgagcacttcttcatcgtggaccggctgaaaagcctgatcaaatacaagggctaccaggtagccccagccgaactggagagcatcctgctgcaacaccccaacatcttcgacgccggggtcgccggcctgcccgacgacgatgccggcgagctgcccgccgcagtcgtcgtgctggaacacggtaaaaccatgaccgagaaggagatcgtggactatgtggccagccaggttacaaccgccaagaagctgcgcggtggtgttgtgttcgtggacgaggtgcctaaaggactgaccggcaagttggacgcccgcaagatccgcgagattctcattaaggccaagaagggcggcaagatcgccgtgtaatctagacggcgcgcccacccagcggccgcgccgccgctccagctttgcacgtttcgatcccaaaggccctttttagggccgaccattttcattgcaaaaaaaaaaaaaaaaaaaaaaaaaaaaaagcatatgactaaaaaaaaaaaaaaaaaaaaaaaaaaaaaaaaaaaaaaaaaaaaaaaaaaaaaaaaaaaaaaaaaaaaaaaaaaaaaaaaaaaaaaaagaagagcgtttaaacacgtgatatctggcctcatgggccttcctttcactgcccgctttccagtcgggaaacctgtcgtgccagctgcattaacatggtcatagctgtttccttgcgtattgggcgctctccgcttcctcgctcactgactcgctgcgctcggtcgttcgggtaaagcctggggtgcctaatgagcaaaaggccagcaaaaggccaggaaccgtaaaaaggccgcgttgctggcgtttttccataggctccgcccccctgacgagcatcacaaaaatcgacgctcaagtcagaggtggcgaaacccgacaggactataaagataccaggcgtttccccctggaagctccctcgtgcgctctcctgttccgaccctgccgcttaccggatacctgtccgcctttctcccttcgggaagcgtggcgctttctcatagctcacgctgtaggtatctcagttcggtgtaggtcgttcgctccaagctgggctgtgtgcacgaaccccccgttcagcccgaccgctgcgccttatccggtaactatcgtcttgagtccaacccggtaagacacgacttatcgccactggcagcagccactggtaacaggattagcagagcgaggtatgtaggcggtgctacagagttcttgaagtggtggcctaactacggctacactagaagaacagtatttggtatctgcgctctgctgaagccagttaccttcggaaaaagagttggtagctcttgatccggcaaacaaaccaccgctggtagcggtggtttttttgtttgcaagcagcagattacgcgcagaaaaaaaggatctcaagaagatcctttgatcttttctacggggtctgacgctcagtggaacgaaaactcacgttaagggattttggtcatgaatacacggtgcctgactgcgttagcaatttaactgtgataaactaccgcattaaagcttatcgatgataagctgtcaaacatgagaattcttagaaaaactcatcgagcatcaaatgaaactgcaatttattcatatcaggattatcaataccatatttttgaaaaagccgtttctgtaatgaaggagaaaactcaccgaggcagttccataggatggcaagatcctggtatcggtctgcgattccgactcgtccaacatcaatacaacctattaatttcccctcgtcaaaaataaggttatcaagtgagaaatcaccatgagtgacgactgaatccggtgagaatggcaaaagcttatgcatttctttccagacttgttcaacaggccagccattacgctcgtcatcaaaatcactcgcatcaaccaaaccgttattcattcgtgattgcgcctgagcgagacgaaatacgcgatcgctgttaaaaggacaattacaaacaggaatcgaatgcaaccggcgcaggaacactgccagcgcatcaacaatattttcacctgaatcaggatattcttctaatacctggaatgctgttttcccggggatcgcagtggtgagtaaccatgcatcatcaggagtacggataaaatgcttgatggtcggaagaggcataaattccgtcagccagtttagtctgaccatctcatctgtaacatcattggcaacgctacctttgccatgtttcagaaacaactctggcgcatcgggcttcccatacaatcgatagattgtcgcacctgattgcccgacattatcgcgagcccatttatacccatataaatcagcatccatgttggaatttaatcgcggcctcgagcaagacgtttcccgttgaatatggctcataacaccccttgtattactgtttatgtaagcagacagttttattgttcatgagcggatacatatttgaatgtatttagaaaaataaacaaataggggttccgcgcacatttccccgaaaagtgccacctaaattgtaagcgttaatattttgttaaaattcgcgttaaatttttgttaaatcagctcattttttaaccaataggccgaaatcggcaaaatcccttataaatcaaaagaatagaccgagatagggttgagtggccgctacagggcgctcccattcgccattcaggctgcgcaactgttgggaagggcgtttcggtgcgggcctcttcgctattacgccagctggcgaaagggggatgtgctgcaaggcgattaagttgggtaacgccagggttttcccagtcac

SEQ ID NO: 108 - DNA, 4442 bp, synthetic construct
  source 1..4442: mol_type = other DNA
acgcgtaatacgactcactatagggctgggactggctgagcctggcgggaggcggggtccgagtcaccgcctgccgccgcgcccccggtttctataaattgagcccgcagcctcccgcttcgctctctgctcctcctgttcgacagtcagccgcatcttcttttgcgtcgccagccgagccacatcgctcagacacatggaagatgccaaaaacattaagaagggcccagcgccattctacccactcgaagacgggaccgccggcgagcagctgcacaaagccatgaagcgctacgccctggtgcccggcaccatcgcctttaccgacgcacatatcgaggtggacattacctacgccgagtacttcgagatgagcgttcggctggcagaagctatgaagcgctatgggctgaatacaaaccatcggatcgtggtgtgcagcgagaatagcttgcagttcttcatgcccgtgttgggtgccctgttcatcggtgtggctgtggccccagctaacgacatctacaacgagcgcgagctgctgaacagcatgggcatcagccagcccaccgtcgtattcgtgagcaagaaagggctgcaaaagatcctcaacgtgcaaaagaagctaccgatcatacaaaagatcatcatcatggatagcaagaccgactaccagggcttccaaagcatgtacaccttcgtgacttcccatttgccacccggcttcaacgagtacgacttcgtgcccgagagcttcgaccgggacaaaaccatcgccctgatcatgaacagtagtggcagtaccggattgcccaagggcgtagccctaccgcaccgcaccgcttgtgtccgattcagtcatgcccgcgaccccatcttcggcaaccagatcatccccgacaccgctatcctcagcgtggtgccatttcaccacggcttcggcatgttcaccacgctgggctacttgatctgcggctttcgggtcgtgctcatgtaccgcttcgaggaggagctattcttgcgcagcttgcaagactataagattcaatctgccctgctggtgcccacactatttagcttcttcgctaagagcactctcatcgacaagtacgacctaagcaacttgcacgagatcgccagcggcggggcgccgctcagcaaggaggtaggtgaggccgtggccaaacgcttccacctaccaggcatccgccagggctacggcctgacagaaacaaccagcgccattctgatcacccccgaaggggacgacaagcctggcgcagtaggcaaggtggtgcccttcttcgaggctaaggtggtggacttggacaccggtaagacactgggtgtgaaccagcgcggcgagctgtgcgtccgtggccccatgatcatgagcggctacgttaacaaccccgaggctacaaacgctctcatcgacaaggacggctggctgcacagcggcgacatcgcctactgggacgaggacgagcacttcttcatcgtggaccggctgaaaagcctgatcaaatacaagggctaccaggtagccccagccgaactggagagcatcctgctgcaacaccccaacatcttcgacgccggggtcgccggcctgcccgacgacgatgccggcgagctgcccgccgcagtcgtcgtgctggaacacggtaaaaccatgaccgagaaggagatcgtggactatgtggccagccaggttacaaccgccaagaagctgcgcggtggtgttgtgttcgtggacgaggtgcctaaaggactgaccggcaagttggacgcccgcaagatccgcgagattctcattaaggccaagaagggcggcaagatcgccgtgtaatctagacggcgcgcccacccagcggccgcacccctggaccaccagccccagcaagagcacaagaggaagagagagaccctcactgctggggagtccctgccacactcagtcccccaccacactgaatctcccctcctcacagttgccatgtagaccccttgaagaggggaggggcctagggagccgcaccttgtcatgtaccatcaataaagtaccctgtgctcattttcattgcaaaaaaaaaaaaaaaaaaaaaaaaaaaaaagcatatgactaaaaaaaaaaaaaaaaaaaaaaaaaaaaaaaaaaaaaaaaaaaaaaaaaaaaaaaaaaaaaaaaaaaaaaaaaaaaaaaaaaaaaaaagaagagcgtttaaacacgtgatatctggcctcatgggccttcctttcactgcccgctttccagtcgggaaacctgtcgtgccagctgcattaacatggtcatagctgtttccttgcgtattgggcgctctccgcttcctcgctcactgactcgctgcgctcggtcgttcgggtaaagcctggggtgcctaatgagcaaaaggccagcaaaaggccaggaaccgtaaaaaggccgcgttgctggcgtttttccataggctccgcccccctgacgagcatcacaaaaatcgacgctcaagtcagaggtggcgaaacccgacaggactataaagataccaggcgtttccccctggaagctccctcgtgcgctctcctgttccgaccctgccgcttaccggatacctgtccgcctttctcccttcgggaagcgtggcgctttctcatagctcacgctgtaggtatctcagttcggtgtaggtcgttcgctccaagctgggctgtgtgcacgaaccccccgttcagcccgaccgctgcgccttatccggtaactatcgtcttgagtccaacccggtaagacacgacttatcgccactggcagcagccactggtaacaggattagcagagcgaggtatgtaggcggtgctacagagttcttgaagtggtggcctaactacggctacactagaagaacagtatttggtatctgcgctctgctgaagccagttaccttcggaaaaagagttggtagctcttgatccggcaaacaaaccaccgctggtagcggtggtttttttgtttgcaagcagcagattacgcgcagaaaaaaaggatctcaagaagatcctttgatcttttctacggggtctgacgctcagtggaacgaaaactcacgttaagggattttggtcatgaatacacggtgcctgactgcgttagcaatttaactgtgataaactaccgcattaaagcttatcgatgataagctgtcaaacatgagaattcttagaaaaactcatcgagcatcaaatgaaactgcaatttattcatatcaggattatcaataccatatttttgaaaaagccgtttctgtaatgaaggagaaaactcaccgaggcagttccataggatggcaagatcctggtatcggtctgcgattccgactcgtccaacatcaatacaacctattaatttcccctcgtcaaaaataaggttatcaagtgagaaatcaccatgagtgacgactgaatccggtgagaatggcaaaagcttatgcatttctttccagacttgttcaacaggccagccattacgctcgtcatcaaaatcactcgcatcaaccaaaccgttattcattcgtgattgcgcctgagcgagacgaaatacgcgatcgctgttaaaaggacaattacaaacaggaatcgaatgcaaccggcgcaggaacactgccagcgcatcaacaatattttcacctgaatcaggatattcttctaatacctggaatgctgttttcccggggatcgcagtggtgagtaaccatgcatcatcaggagtacggataaaatgcttgatggtcggaagaggcataaattccgtcagccagtttagtctgaccatctcatctgtaacatcattggcaacgctacctttgccatgtttcagaaacaactctggcgcatcgggcttcccatacaatcgatagattgtcgcacctgattgcccgacattatcgcgagcccatttatacccatataaatcagcatccatgttggaatttaatcgcggcctcgagcaagacgtttcccgttgaatatggctcataacaccccttgtattactgtttatgtaagcagacagttttattgttcatgagcggatacatatttgaatgtatttagaaaaataaacaaataggggttccgcgcacatttccccgaaaagtgccacctaaattgtaagcgttaatattttgttaaaattcgcgttaaatttttgttaaatcagctcattttttaaccaataggccgaaatcggcaaaatcccttataaatcaaaagaatagaccgagatagggttgagtggccgctacagggcgctcccattcgccattcaggctgcgcaactgttgggaagggcgtttcggtgcgggcctcttcgctattacgccagctggcgaaagggggatgtgctgcaaggcgattaagttgggtaacgccagggttttcccagtcac

SEQ ID NO: 109 - DNA, 4445 bp, synthetic construct
  source 1..4445: mol_type = other DNA
acgcgtaatacgactcactatagccttctggaaggttctaagatagggtataagaggcagggtggcgggcggaaaccggtctcattgaactcgcctgcagctcttgggttttttgtggcttccttcgttattggagccaggcctacaccccagcaacatggaagatgccaaaaacattaagaagggcccagcgccattctacccactcgaagacgggaccgccggcgagcagctgcacaaagccatgaagcgctacgccctggtgcccggcaccatcgcctttaccgacgcacatatcgaggtggacattacctacgccgagtacttcgagatgagcgttcggctggcagaagctatgaagcgctatgggctgaatacaaaccatcggatcgtggtgtgcagcgagaatagcttgcagttcttcatgcccgtgttgggtgccctgttcatcggtgtggctgtggccccagctaacgacatctacaacgagcgcgagctgctgaacagcatgggcatcagccagcccaccgtcgtattcgtgagcaagaaagggctgcaaaagatcctcaacgtgcaaaagaagctaccgatcatacaaaagatcatcatcatggatagcaagaccgactaccagggcttccaaagcatgtacaccttcgtgacttcccatttgccacccggcttcaacgagtacgacttcgtgcccgagagcttcgaccgggacaaaaccatcgccctgatcatgaacagtagtggcagtaccggattgcccaagggcgtagccctaccgcaccgcaccgcttgtgtccgattcagtcatgcccgcgaccccatcttcggcaaccagatcatccccgacaccgctatcctcagcgtggtgccatttcaccacggcttcggcatgttcaccacgctgggctacttgatctgcggctttcgggtcgtgctcatgtaccgcttcgaggaggagctattcttgcgcagcttgcaagactataagattcaatctgccctgctggtgcccacactatttagcttcttcgctaagagcactctcatcgacaagtacgacctaagcaacttgcacgagatcgccagcggcggggcgccgctcagcaaggaggtaggtgaggccgtggccaaacgcttccacctaccaggcatccgccagggctacggcctgacagaaacaaccagcgccattctgatcacccccgaaggggacgacaagcctggcgcagtaggcaaggtggtgcccttcttcgaggctaaggtggtggacttggacaccggtaagacactgggtgtgaaccagcgcggcgagctgtgcgtccgtggccccatgatcatgagcggctacgttaacaaccccgaggctacaaacgctctcatcgacaaggacggctggctgcacagcggcgacatcgcctactgggacgaggacgagcacttcttcatcgtggaccggctgaaaagcctgatcaaatacaagggctaccaggtagccccagccgaactggagagcatcctgctgcaacaccccaacatcttcgacgccggggtcgccggcctgcccgacgacgatgccggcgagctgcccgccgcagtcgtcgtgctggaacacggtaaaaccatgaccgagaaggagatcgtggactatgtggccagccaggttacaaccgccaagaagctgcgcggtggtgttgtgttcgtggacgaggtgcctaaaggactgaccggcaagttggacgcccgcaagatccgcgagattctcattaaggccaagaagggcggcaagatcgccgtgtaatctagacggcgcgcccacccagcggccgcaaccaagtgtagatgtagcattgttccacacatttaaaacatttgaaggacctaaattcgtagcaaattctgtggcagttttaaaaagttaagctgctatagtaagttactgggcattctcaatacttgaatatggaacatatacacaggggaaggaaataacattgtactttataaacactgtattgtaagtggaaaatacaatgtcttaaataaaactatttaaaattggcaccatttttcattgcaaaaaaaaaaaaaaaaaaaaaaaaaaaaaagcatatgactaaaaaaaaaaaaaaaaaaaaaaaaaaaaaaaaaaaaaaaaaaaaaaaaaaaaaaaaaaaaaaaaaaaaaaaaaaaaaaaaaaaaaaaagaagagcgtttaaacacgtgatatctggcctcatgggccttcctttcactgcccgctttccagtcgggaaacctgtcgtgccagctgcattaacatggtcatagctgtttccttgcgtattgggcgctctccgcttcctcgctcactgactcgctgcgctcggtcgttcgggtaaagcctggggtgcctaatgagcaaaaggccagcaaaaggccaggaaccgtaaaaaggccgcgttgctggcgtttttccataggctccgcccccctgacgagcatcacaaaaatcgacgctcaagtcagaggtggcgaaacccgacaggactataaagataccaggcgtttccccctggaagctccctcgtgcgctctcctgttccgaccctgccgcttaccggatacctgtccgcctttctcccttcgggaagcgtggcgctttctcatagctcacgctgtaggtatctcagttcggtgtaggtcgttcgctccaagctgggctgtgtgcacgaaccccccgttcagcccgaccgctgcgccttatccggtaactatcgtcttgagtccaacccggtaagacacgacttatcgccactggcagcagccactggtaacaggattagcagagcgaggtatgtaggcggtgctacagagttcttgaagtggtggcctaactacggctacactagaagaacagtatttggtatctgcgctctgctgaagccagttaccttcggaaaaagagttggtagctcttgatccggcaaacaaaccaccgctggtagcggtggtttttttgtttgcaagcagcagattacgcgcagaaaaaaaggatctcaagaagatcctttgatcttttctacggggtctgacgctcagtggaacgaaaactcacgttaagggattttggtcatgaatacacggtgcctgactgcgttagcaatttaactgtgataaactaccgcattaaagcttatcgatgataagctgtcaaacatgagaattcttagaaaaactcatcgagcatcaaatgaaactgcaatttattcatatcaggattatcaataccatatttttgaaaaagccgtttctgtaatgaaggagaaaactcaccgaggcagttccataggatggcaagatcctggtatcggtctgcgattccgactcgtccaacatcaatacaacctattaatttcccctcgtcaaaaataaggttatcaagtgagaaatcaccatgagtgacgactgaatccggtgagaatggcaaaagcttatgcatttctttccagacttgttcaacaggccagccattacgctcgtcatcaaaatcactcgcatcaaccaaaccgttattcattcgtgattgcgcctgagcgagacgaaatacgcgatcgctgttaaaaggacaattacaaacaggaatcgaatgcaaccggcgcaggaacactgccagcgcatcaacaatattttcacctgaatcaggatattcttctaatacctggaatgctgttttcccggggatcgcagtggtgagtaaccatgcatcatcaggagtacggataaaatgcttgatggtcggaagaggcataaattccgtcagccagtttagtctgaccatctcatctgtaacatcattggcaacgctacctttgccatgtttcagaaacaactctggcgcatcgggcttcccatacaatcgatagattgtcgcacctgattgcccgacattatcgcgagcccatttatacccatataaatcagcatccatgttggaatttaatcgcggcctcgagcaagacgtttcccgttgaatatggctcataacaccccttgtattactgtttatgtaagcagacagttttattgttcatgagcggatacatatttgaatgtatttagaaaaataaacaaataggggttccgcgcacatttccccgaaaagtgccacctaaattgtaagcgttaatattttgttaaaattcgcgttaaatttttgttaaatcagctcattttttaaccaataggccgaaatcggcaaaatcccttataaatcaaaagaatagaccgagatagggttgagtggccgctacagggcgctcccattcgccattcaggctgcgcaactgttgggaagggcgtttcggtgcgggcctcttcgctattacgccagctggcgaaagggggatgtgctgcaaggcgattaagttgggtaacgccagggttttcccagtcac

SEQ ID NO: 110 - DNA, 4406 bp, synthetic construct
  source 1..4406: mol_type = other DNA
acgcgtaatacgactcactatagttccctatcactctctttaatcactactcacagtaacctcaactcctgccacaatggaagatgccaaaaacattaagaagggcccagcgccattctacccactcgaagacgggaccgccggcgagcagctgcacaaagccatgaagcgctacgccctggtgcccggcaccatcgcctttaccgacgcacatatcgaggtggacattacctacgccgagtacttcgagatgagcgttcggctggcagaagctatgaagcgctatgggctgaatacaaaccatcggatcgtggtgtgcagcgagaatagcttgcagttcttcatgcccgtgttgggtgccctgttcatcggtgtggctgtggccccagctaacgacatctacaacgagcgcgagctgctgaacagcatgggcatcagccagcccaccgtcgtattcgtgagcaagaaagggctgcaaaagatcctcaacgtgcaaaagaagctaccgatcatacaaaagatcatcatcatggatagcaagaccgactaccagggcttccaaagcatgtacaccttcgtgacttcccatttgccacccggcttcaacgagtacgacttcgtgcccgagagcttcgaccgggacaaaaccatcgccctgatcatgaacagtagtggcagtaccggattgcccaagggcgtagccctaccgcaccgcaccgcttgtgtccgattcagtcatgcccgcgaccccatcttcggcaaccagatcatccccgacaccgctatcctcagcgtggtgccatttcaccacggcttcggcatgttcaccacgctgggctacttgatctgcggctttcgggtcgtgctcatgtaccgcttcgaggaggagctattcttgcgcagcttgcaagactataagattcaatctgccctgctggtgcccacactatttagcttcttcgctaagagcactctcatcgacaagtacgacctaagcaacttgcacgagatcgccagcggcggggcgccgctcagcaaggaggtaggtgaggccgtggccaaacgcttccacctaccaggcatccgccagggctacggcctgacagaaacaaccagcgccattctgatcacccccgaaggggacgacaagcctggcgcagtaggcaaggtggtgcccttcttcgaggctaaggtggtggacttggacaccggtaagacactgggtgtgaaccagcgcggcgagctgtgcgtccgtggccccatgatcatgagcggctacgttaacaaccccgaggctacaaacgctctcatcgacaaggacggctggctgcacagcggcgacatcgcctactgggacgaggacgagcacttcttcatcgtggaccggctgaaaagcctgatcaaatacaagggctaccaggtagccccagccgaactggagagcatcctgctgcaacaccccaacatcttcgacgccggggtcgccggcctgcccgacgacgatgccggcgagctgcccgccgcagtcgtcgtgctggaacacggtaaaaccatgaccgagaaggagatcgtggactatgtggccagccaggttacaaccgccaagaagctgcgcggtggtgttgtgttcgtggacgaggtgcctaaaggactgaccggcaagttggacgcccgcaagatccgcgagattctcattaaggccaagaagggcggcaagatcgccgtgtaatctagacggcgcgcccacccagcggccgctaattaagtgcttcccacttaaaacatatcaggccttctatttatttaaatatttaaattttatatttattgttgaatgtatggtttgctacctattgtaactattattcttaatcttaaaactataaatatggatcttttatgattctttttgtaagccctaggggctctaaaatggtttcacttatttatcccaaaatatttattattatgttgaatgttaaatatagtatctatgtagattggttagtaaaactatttaataaatttgataaatatattttcattgcaaaaaaaaaaaaaaaaaaaaaaaaaaaaaagcatatgactaaaaaaaaaaaaaaaaaaaaaaaaaaaaaaaaaaaaaaaaaaaaaaaaaaaaaaaaaaaaaaaaaaaaaaaaaaaaaaaaaaaaaaaagaagagcgtttaaacacgtgatatctggcctcatgggccttcctttcactgcccgctttccagtcgggaaacctgtcgtgccagctgcattaacatggtcatagctgtttccttgcgtattgggcgctctccgcttcctcgctcactgactcgctgcgctcggtcgttcgggtaaagcctggggtgcctaatgagcaaaaggccagcaaaaggccaggaaccgtaaaaaggccgcgttgctggcgtttttccataggctccgcccccctgacgagcatcacaaaaatcgacgctcaagtcagaggtggcgaaacccgacaggactataaagataccaggcgtttccccctggaagctccctcgtgcgctctcctgttccgaccctgccgcttaccggatacctgtccgcctttctcccttcgggaagcgtggcgctttctcatagctcacgctgtaggtatctcagttcggtgtaggtcgttcgctccaagctgggctgtgtgcacgaaccccccgttcagcccgaccgctgcgccttatccggtaactatcgtcttgagtccaacccggtaagacacgacttatcgccactggcagcagccactggtaacaggattagcagagcgaggtatgtaggcggtgctacagagttcttgaagtggtggcctaactacggctacactagaagaacagtatttggtatctgcgctctgctgaagccagttaccttcggaaaaagagttggtagctcttgatccggcaaacaaaccaccgctggtagcggtggtttttttgtttgcaagcagcagattacgcgcagaaaaaaaggatctcaagaagatcctttgatcttttctacggggtctgacgctcagtggaacgaaaactcacgttaagggattttggtcatgaatacacggtgcctgactgcgttagcaatttaactgtgataaactaccgcattaaagcttatcgatgataagctgtcaaacatgagaattcttagaaaaactcatcgagcatcaaatgaaactgcaatttattcatatcaggattatcaataccatatttttgaaaaagccgtttctgtaatgaaggagaaaactcaccgaggcagttccataggatggcaagatcctggtatcggtctgcgattccgactcgtccaacatcaatacaacctattaatttcccctcgtcaaaaataaggttatcaagtgagaaatcaccatgagtgacgactgaatccggtgagaatggcaaaagcttatgcatttctttccagacttgttcaacaggccagccattacgctcgtcatcaaaatcactcgcatcaaccaaaccgttattcattcgtgattgcgcctgagcgagacgaaatacgcgatcgctgttaaaaggacaattacaaacaggaatcgaatgcaaccggcgcaggaacactgccagcgcatcaacaatattttcacctgaatcaggatattcttctaatacctggaatgctgttttcccggggatcgcagtggtgagtaaccatgcatcatcaggagtacggataaaatgcttgatggtcggaagaggcataaattccgtcagccagtttagtctgaccatctcatctgtaacatcattggcaacgctacctttgccatgtttcagaaacaactctggcgcatcgggcttcccatacaatcgatagattgtcgcacctgattgcccgacattatcgcgagcccatttatacccatataaatcagcatccatgttggaatttaatcgcggcctcgagcaagacgtttcccgttgaatatggctcataacaccccttgtattactgtttatgtaagcagacagttttattgttcatgagcggatacatatttgaatgtatttagaaaaataaacaaataggggttccgcgcacatttccccgaaaagtgccacctaaattgtaagcgttaatattttgttaaaattcgcgttaaatttttgttaaatcagctcattttttaaccaataggccgaaatcggcaaaatcccttataaatcaaaagaatagaccgagatagggttgagtggccgctacagggcgctcccattcgccattcaggctgcgcaactgttgggaagggcgtttcggtgcgggcctcttcgctattacgccagctggcgaaagggggatgtgctgcaaggcgattaagttgggtaacgccagggttttcccagtcac

SEQ ID NO: 111 - DNA, 4752 bp, synthetic construct
  source 1..4752: mol_type = other DNA
acgcgtaatacgactcactatagccgccgagaccgcgtccgccccgcgagcacagagcctcgcctttgccgatccgccgcccgtccacacccgccgccagctcacatggaagatgccaaaaacattaagaagggcccagcgccattctacccactcgaagacgggaccgccggcgagcagctgcacaaagccatgaagcgctacgccctggtgcccggcaccatcgcctttaccgacgcacatatcgaggtggacattacctacgccgagtacttcgagatgagcgttcggctggcagaagctatgaagcgctatgggctgaatacaaaccatcggatcgtggtgtgcagcgagaatagcttgcagttcttcatgcccgtgttgggtgccctgttcatcggtgtggctgtggccccagctaacgacatctacaacgagcgcgagctgctgaacagcatgggcatcagccagcccaccgtcgtattcgtgagcaagaaagggctgcaaaagatcctcaacgtgcaaaagaagctaccgatcatacaaaagatcatcatcatggatagcaagaccgactaccagggcttccaaagcatgtacaccttcgtgacttcccatttgccacccggcttcaacgagtacgacttcgtgcccgagagcttcgaccgggacaaaaccatcgccctgatcatgaacagtagtggcagtaccggattgcccaagggcgtagccctaccgcaccgcaccgcttgtgtccgattcagtcatgcccgcgaccccatcttcggcaaccagatcatccccgacaccgctatcctcagcgtggtgccatttcaccacggcttcggcatgttcaccacgctgggctacttgatctgcggctttcgggtcgtgctcatgtaccgcttcgaggaggagctattcttgcgcagcttgcaagactataagattcaatctgccctgctggtgcccacactatttagcttcttcgctaagagcactctcatcgacaagtacgacctaagcaacttgcacgagatcgccagcggcggggcgccgctcagcaaggaggtaggtgaggccgtggccaaacgcttccacctaccaggcatccgccagggctacggcctgacagaaacaaccagcgccattctgatcacccccgaaggggacgacaagcctggcgcagtaggcaaggtggtgcccttcttcgaggctaaggtggtggacttggacaccggtaagacactgggtgtgaaccagcgcggcgagctgtgcgtccgtggccccatgatcatgagcggctacgttaacaaccccgaggctacaaacgctctcatcgacaaggacggctggctgcacagcggcgacatcgcctactgggacgaggacgagcacttcttcatcgtggaccggctgaaaagcctgatcaaatacaagggctaccaggtagccccagccgaactggagagcatcctgctgcaacaccccaacatcttcgacgccggggtcgccggcctgcccgacgacgatgccggcgagctgcccgccgcagtcgtcgtgctggaacacggtaaaaccatgaccgagaaggagatcgtggactatgtggccagccaggttacaaccgccaagaagctgcgcggtggtgttgtgttcgtggacgaggtgcctaaaggactgaccggcaagttggacgcccgcaagatccgcgagattctcattaaggccaagaagggcggcaagatcgccgtgtaatctagacggcgcgcccacccagcggccgcggactatgacttagttgcgttacaccctttcttgacaaaacctaacttgcgcagaaaacaagatgagattggcatggctttatttgttttttttgttttgttttggttttttttttttttttggcttgactcaggatttaaaaactggaacggtgaaggtgacagcagtcggttggagcgagcatcccccaaagttcacaatgtggccgaggactttgattgcacattgttgtttttttaatagtcattccaaatatgagatgcgttgttacaggaagtcccttgccatcctaaaagccaccccacttctctctaaggagaatggcccagtcctctcccaagtccacacaggggaggtgatagcattgttttcgtgtaaattatgtaatgcaaaatttttttaatcttcgccttaatacttttttattttgttttattttgaatgatgagccttcgtgcccccccttcccccttttttgtcccccaacttgagatgtatgaaggcttttggtctccctgggagtgggtggaggcagccagggcttacctgtacactgacttgagaccagttgaataaaagtgcacaccttaaaaatgttttcattgcaaaaaaaaaaaaaaaaaaaaaaaaaaaaaagcatatgactaaaaaaaaaaaaaaaaaaaaaaaaaaaaaaaaaaaaaaaaaaaaaaaaaaaaaaaaaaaaaaaaaaaaaaaaaaaaaaaaaaaaaaaagaagagcgtttaaacacgtgatatctggcctcatgggccttcctttcactgcccgctttccagtcgggaaacctgtcgtgccagctgcattaacatggtcatagctgtttccttgcgtattgggcgctctccgcttcctcgctcactgactcgctgcgctcggtcgttcgggtaaagcctggggtgcctaatgagcaaaaggccagcaaaaggccaggaaccgtaaaaaggccgcgttgctggcgtttttccataggctccgcccccctgacgagcatcacaaaaatcgacgctcaagtcagaggtggcgaaacccgacaggactataaagataccaggcgtttccccctggaagctccctcgtgcgctctcctgttccgaccctgccgcttaccggatacctgtccgcctttctcccttcgggaagcgtggcgctttctcatagctcacgctgtaggtatctcagttcggtgtaggtcgttcgctccaagctgggctgtgtgcacgaaccccccgttcagcccgaccgctgcgccttatccggtaactatcgtcttgagtccaacccggtaagacacgacttatcgccactggcagcagccactggtaacaggattagcagagcgaggtatgtaggcggtgctacagagttcttgaagtggtggcctaactacggctacactagaagaacagtatttggtatctgcgctctgctgaagccagttaccttcggaaaaagagttggtagctcttgatccggcaaacaaaccaccgctggtagcggtggtttttttgtttgcaagcagcagattacgcgcagaaaaaaaggatctcaagaagatcctttgatcttttctacggggtctgacgctcagtggaacgaaaactcacgttaagggattttggtcatgaatacacggtgcctgactgcgttagcaatttaactgtgataaactaccgcattaaagcttatcgatgataagctgtcaaacatgagaattcttagaaaaactcatcgagcatcaaatgaaactgcaatttattcatatcaggattatcaataccatatttttgaaaaagccgtttctgtaatgaaggagaaaactcaccgaggcagttccataggatggcaagatcctggtatcggtctgcgattccgactcgtccaacatcaatacaacctattaatttcccctcgtcaaaaataaggttatcaagtgagaaatcaccatgagtgacgactgaatccggtgagaatggcaaaagcttatgcatttctttccagacttgttcaacaggccagccattacgctcgtcatcaaaatcactcgcatcaaccaaaccgttattcattcgtgattgcgcctgagcgagacgaaatacgcgatcgctgttaaaaggacaattacaaacaggaatcgaatgcaaccggcgcaggaacactgccagcgcatcaacaatattttcacctgaatcaggatattcttctaatacctggaatgctgttttcccggggatcgcagtggtgagtaaccatgcatcatcaggagtacggataaaatgcttgatggtcggaagaggcataaattccgtcagccagtttagtctgaccatctcatctgtaacatcattggcaacgctacctttgccatgtttcagaaacaactctggcgcatcgggcttcccatacaatcgatagattgtcgcacctgattgcccgacattatcgcgagcccatttatacccatataaatcagcatccatgttggaatttaatcgcggcctcgagcaagacgtttcccgttgaatatggctcataacaccccttgtattactgtttatgtaagcagacagttttattgttcatgagcggatacatatttgaatgtatttagaaaaataaacaaataggggttccgcgcacatttccccgaaaagtgccacctaaattgtaagcgttaatattttgttaaaattcgcgttaaatttttgttaaatcagctcattttttaaccaataggccgaaatcggcaaaatcccttataaatcaaaagaatagaccgagatagggttgagtggccgctacagggcgctcccattcgccattcaggctgcgcaactgttgggaagggcgtttcggtgcgggcctcttcgctattacgccagctggcgaaagggggatgtgctgcaaggcgattaagttgggtaacgccagggttttcccagtcac

SEQ ID NO: 112 - DNA, 4943 bp, synthetic construct
  source 1..4943: mol_type = other DNA
acgcgtaatacgactcactataggggctttgcctgtcattctgcagttctagtgtggggtctgggcgcagttcttttccctctccagcctcggagtcttcctctgtggactgcgcagataggactggtggcacggaccagctctgcagccctggagtcaggagcagagccccccggctcccagcccgccgtagccgctcctggcaccgagcgagccgcgatgacaatggctgcattgtgcttcatgtcccttcccatcaacatttctgtgctggactccttccactcgcgggtcgtctccagagctcagaaaatgaggtgatcagtgggacgagtaaggaaggggggttgggagaggggcgattgggcaacccggctgcacaaacacgggaggtcaaagattgcgcccagcccgcccaggccgggaatggaataaagggacgcggggcgccggaggctgcacagaagcgagtccgactgtgctcgctgctcagcgccgcacccggaagatggaagatgccaaaaacattaagaagggcccagcgccattctacccactcgaagacgggaccgccggcgagcagctgcacaaagccatgaagcgctacgccctggtgcccggcaccatcgcctttaccgacgcacatatcgaggtggacattacctacgccgagtacttcgagatgagcgttcggctggcagaagctatgaagcgctatgggctgaatacaaaccatcggatcgtggtgtgcagcgagaatagcttgcagttcttcatgcccgtgttgggtgccctgttcatcggtgtggctgtggccccagctaacgacatctacaacgagcgcgagctgctgaacagcatgggcatcagccagcccaccgtcgtattcgtgagcaagaaagggctgcaaaagatcctcaacgtgcaaaagaagctaccgatcatacaaaagatcatcatcatggatagcaagaccgactaccagggcttccaaagcatgtacaccttcgtgacttcccatttgccacccggcttcaacgagtacgacttcgtgcccgagagcttcgaccgggacaaaaccatcgccctgatcatgaacagtagtggcagtaccggattgcccaagggcgtagccctaccgcaccgcaccgcttgtgtccgattcagtcatgcccgcgaccccatcttcggcaaccagatcatccccgacaccgctatcctcagcgtggtgccatttcaccacggcttcggcatgttcaccacgctgggctacttgatctgcggctttcgggtcgtgctcatgtaccgcttcgaggaggagctattcttgcgcagcttgcaagactataagattcaatctgccctgctggtgcccacactatttagcttcttcgctaagagcactctcatcgacaagtacgacctaagcaacttgcacgagatcgccagcggcggggcgccgctcagcaaggaggtaggtgaggccgtggccaaacgcttccacctaccaggcatccgccagggctacggcctgacagaaacaaccagcgccattctgatcacccccgaaggggacgacaagcctggcgcagtaggcaaggtggtgcccttcttcgaggctaaggtggtggacttggacaccggtaagacactgggtgtgaaccagcgcggcgagctgtgcgtccgtggccccatgatcatgagcggctacgttaacaaccccgaggctacaaacgctctcatcgacaaggacggctggctgcacagcggcgacatcgcctactgggacgaggacgagcacttcttcatcgtggaccggctgaaaagcctgatcaaatacaagggctaccaggtagccccagccgaactggagagcatcctgctgcaacaccccaacatcttcgacgccggggtcgccggcctgcccgacgacgatgccggcgagctgcccgccgcagtcgtcgtgctggaacacggtaaaaccatgaccgagaaggagatcgtggactatgtggccagccaggttacaaccgccaagaagctgcgcggtggtgttgtgttcgtggacgaggtgcctaaaggactgaccggcaagttggacgcccgcaagatccgcgagattctcattaaggccaagaagggcggcaagatcgccgtgtaatctagacggcgcgcccacccagcggccgcaatctcagaggtagggctgccaccaaggtgaagatgggaacgcagatgatccatgagtttgccctggtttcactggcccaagtggtttgtgctaaccacgtctgtcttcacagctctgtgttgccatgtgtgctgaacaaaaaataaaaattattattgattttatatttcaaaaactccattctttcctaaatattttcaacaaaggatttctttatgcattctgcctaaatacctatgcaactgagcccttccttctcagctcaagattcgtctggtctttccctacagctttgtgtgtgccatggccacatctcctgggtacagttcaaggagacatcttttctaaaagggtctgcgtgatcattaaaatataatcaaatgtttttcattgcaaaaaaaaaaaaaaaaaaaaaaaaaaaaaagcatatgactaaaaaaaaaaaaaaaaaaaaaaaaaaaaaaaaaaaaaaaaaaaaaaaaaaaaaaaaaaaaaaaaaaaaaaaaaaaaaaaaaaaaaaaagaagagcgtttaaacacgtgatatctggcctcatgggccttcctttcactgcccgctttccagtcgggaaacctgtcgtgccagctgcattaacatggtcatagctgtttccttgcgtattgggcgctctccgcttcctcgctcactgactcgctgcgctcggtcgttcgggtaaagcctggggtgcctaatgagcaaaaggccagcaaaaggccaggaaccgtaaaaaggccgcgttgctggcgtttttccataggctccgcccccctgacgagcatcacaaaaatcgacgctcaagtcagaggtggcgaaacccgacaggactataaagataccaggcgtttccccctggaagctccctcgtgcgctctcctgttccgaccctgccgcttaccggatacctgtccgcctttctcccttcgggaagcgtggcgctttctcatagctcacgctgtaggtatctcagttcggtgtaggtcgttcgctccaagctgggctgtgtgcacgaaccccccgttcagcccgaccgctgcgccttatccggtaactatcgtcttgagtccaacccggtaagacacgacttatcgccactggcagcagccactggtaacaggattagcagagcgaggtatgtaggcggtgctacagagttcttgaagtggtggcctaactacggctacactagaagaacagtatttggtatctgcgctctgctgaagccagttaccttcggaaaaagagttggtagctcttgatccggcaaacaaaccaccgctggtagcggtggtttttttgtttgcaagcagcagattacgcgcagaaaaaaaggatctcaagaagatcctttgatcttttctacggggtctgacgctcagtggaacgaaaactcacgttaagggattttggtcatgaatacacggtgcctgactgcgttagcaatttaactgtgataaactaccgcattaaagcttatcgatgataagctgtcaaacatgagaattcttagaaaaactcatcgagcatcaaatgaaactgcaatttattcatatcaggattatcaataccatatttttgaaaaagccgtttctgtaatgaaggagaaaactcaccgaggcagttccataggatggcaagatcctggtatcggtctgcgattccgactcgtccaacatcaatacaacctattaatttcccctcgtcaaaaataaggttatcaagtgagaaatcaccatgagtgacgactgaatccggtgagaatggcaaaagcttatgcatttctttccagacttgttcaacaggccagccattacgctcgtcatcaaaatcactcgcatcaaccaaaccgttattcattcgtgattgcgcctgagcgagacgaaatacgcgatcgctgttaaaaggacaattacaaacaggaatcgaatgcaaccggcgcaggaacactgccagcgcatcaacaatattttcacctgaatcaggatattcttctaatacctggaatgctgttttcccggggatcgcagtggtgagtaaccatgcatcatcaggagtacggataaaatgcttgatggtcggaagaggcataaattccgtcagccagtttagtctgaccatctcatctgtaacatcattggcaacgctacctttgccatgtttcagaaacaactctggcgcatcgggcttcccatacaatcgatagattgtcgcacctgattgcccgacattatcgcgagcccatttatacccatataaatcagcatccatgttggaatttaatcgcggcctcgagcaagacgtttcccgttgaatatggctcataacaccccttgtattactgtttatgtaagcagacagttttattgttcatgagcggatacatatttgaatgtatttagaaaaataaacaaataggggttccgcgcacatttccccgaaaagtgccacctaaattgtaagcgttaatattttgttaaaattcgcgttaaatttttgttaaatcagctcattttttaaccaataggccgaaatcggcaaaatcccttataaatcaaaagaatagaccgagatagggttgagtggccgctacagggcgctcccattcgccattcaggctgcgcaactgttgggaagggcgtttcggtgcgggcctcttcgctattacgccagctggcgaaagggggatgtgctgcaaggcgattaagttgggtaacgccagggttttcccagtcac

SEQ ID NO: 113 - DNA, 4650 bp, synthetic construct
  source 1..4650: mol_type = other DNA
acgcgtaatacgactcactataactcttccgccgtcgtcgccgccatcctcggcgcgactcgcttctttcggttctacctgggagaatccaccgccatccgccacatggaagatgccaaaaacattaagaagggcccagcgccattctacccactcgaagacgggaccgccggcgagcagctgcacaaagccatgaagcgctacgccctggtgcccggcaccatcgcctttaccgacgcacatatcgaggtggacattacctacgccgagtacttcgagatgagcgttcggctggcagaagctatgaagcgctatgggctgaatacaaaccatcggatcgtggtgtgcagcgagaatagcttgcagttcttcatgcccgtgttgggtgccctgttcatcggtgtggctgtggccccagctaacgacatctacaacgagcgcgagctgctgaacagcatgggcatcagccagcccaccgtcgtattcgtgagcaagaaagggctgcaaaagatcctcaacgtgcaaaagaagctaccgatcatacaaaagatcatcatcatggatagcaagaccgactaccagggcttccaaagcatgtacaccttcgtgacttcccatttgccacccggcttcaacgagtacgacttcgtgcccgagagcttcgaccgggacaaaaccatcgccctgatcatgaacagtagtggcagtaccggattgcccaagggcgtagccctaccgcaccgcaccgcttgtgtccgattcagtcatgcccgcgaccccatcttcggcaaccagatcatccccgacaccgctatcctcagcgtggtgccatttcaccacggcttcggcatgttcaccacgctgggctacttgatctgcggctttcgggtcgtgctcatgtaccgcttcgaggaggagctattcttgcgcagcttgcaagactataagattcaatctgccctgctggtgcccacactatttagcttcttcgctaagagcactctcatcgacaagtacgacctaagcaacttgcacgagatcgccagcggcggggcgccgctcagcaaggaggtaggtgaggccgtggccaaacgcttccacctaccaggcatccgccagggctacggcctgacagaaacaaccagcgccattctgatcacccccgaaggggacgacaagcctggcgcagtaggcaaggtggtgcccttcttcgaggctaaggtggtggacttggacaccggtaagacactgggtgtgaaccagcgcggcgagctgtgcgtccgtggccccatgatcatgagcggctacgttaacaaccccgaggctacaaacgctctcatcgacaaggacggctggctgcacagcggcgacatcgcctactgggacgaggacgagcacttcttcatcgtggaccggctgaaaagcctgatcaaatacaagggctaccaggtagccccagccgaactggagagcatcctgctgcaacaccccaacatcttcgacgccggggtcgccggcctgcccgacgacgatgccggcgagctgcccgccgcagtcgtcgtgctggaacacggtaaaaccatgaccgagaaggagatcgtggactatgtggccagccaggttacaaccgccaagaagctgcgcggtggtgttgtgttcgtggacgaggtgcctaaaggactgaccggcaagttggacgcccgcaagatccgcgagattctcattaaggccaagaagggcggcaagatcgccgtgtaatctagacggcgcgcccacccagcggccgcggcccttcctgcagcgcctgccgccccggggactcgcagcacccacagcaccacgtcctcgaattctcagacgacacctggagactgtcccgacacagcgacgctcccctgagaggtttctggggcccgctgcgtgccatcactcaaccataacacttgatgccgtttctttcaatatttatttccagagtccggaggcagcagacacgccctcttagtagggacttaatgggccggtcggggagggggaggcgggatgggacacccaacactttttccatttcttcagagggaaactcagatgtccaaactaattttaacaaacgcattaagaggtttatttgggtacatggcccgcagtggcttttgccccagaaaggggaaaggaacacgcgggtagatgatttctagcaggcaggaagtcctgtgcggtgtcaccatgagcacctccagctgtactagtgccattggaataataaatttgataaggtggtgttttcattgcaaaaaaaaaaaaaaaaaaaaaaaaaaaaaagcatatgactaaaaaaaaaaaaaaaaaaaaaaaaaaaaaaaaaaaaaaaaaaaaaaaaaaaaaaaaaaaaaaaaaaaaaaaaaaaaaaaaaaaaaaaagaagagcgtttaaacacgtgatatctggcctcatgggccttcctttcactgcccgctttccagtcgggaaacctgtcgtgccagctgcattaacatggtcatagctgtttccttgcgtattgggcgctctccgcttcctcgctcactgactcgctgcgctcggtcgttcgggtaaagcctggggtgcctaatgagcaaaaggccagcaaaaggccaggaaccgtaaaaaggccgcgttgctggcgtttttccataggctccgcccccctgacgagcatcacaaaaatcgacgctcaagtcagaggtggcgaaacccgacaggactataaagataccaggcgtttccccctggaagctccctcgtgcgctctcctgttccgaccctgccgcttaccggatacctgtccgcctttctcccttcgggaagcgtggcgctttctcatagctcacgctgtaggtatctcagttcggtgtaggtcgttcgctccaagctgggctgtgtgcacgaaccccccgttcagcccgaccgctgcgccttatccggtaactatcgtcttgagtccaacccggtaagacacgacttatcgccactggcagcagccactggtaacaggattagcagagcgaggtatgtaggcggtgctacagagttcttgaagtggtggcctaactacggctacactagaagaacagtatttggtatctgcgctctgctgaagccagttaccttcggaaaaagagttggtagctcttgatccggcaaacaaaccaccgctggtagcggtggtttttttgtttgcaagcagcagattacgcgcagaaaaaaaggatctcaagaagatcctttgatcttttctacggggtctgacgctcagtggaacgaaaactcacgttaagggattttggtcatgaatacacggtgcctgactgcgttagcaatttaactgtgataaactaccgcattaaagcttatcgatgataagctgtcaaacatgagaattcttagaaaaactcatcgagcatcaaatgaaactgcaatttattcatatcaggattatcaataccatatttttgaaaaagccgtttctgtaatgaaggagaaaactcaccgaggcagttccataggatggcaagatcctggtatcggtctgcgattccgactcgtccaacatcaatacaacctattaatttcccctcgtcaaaaataaggttatcaagtgagaaatcaccatgagtgacgactgaatccggtgagaatggcaaaagcttatgcatttctttccagacttgttcaacaggccagccattacgctcgtcatcaaaatcactcgcatcaaccaaaccgttattcattcgtgattgcgcctgagcgagacgaaatacgcgatcgctgttaaaaggacaattacaaacaggaatcgaatgcaaccggcgcaggaacactgccagcgcatcaacaatattttcacctgaatcaggatattcttctaatacctggaatgctgttttcccggggatcgcagtggtgagtaaccatgcatcatcaggagtacggataaaatgcttgatggtcggaagaggcataaattccgtcagccagtttagtctgaccatctcatctgtaacatcattggcaacgctacctttgccatgtttcagaaacaactctggcgcatcgggcttcccatacaatcgatagattgtcgcacctgattgcccgacattatcgcgagcccatttatacccatataaatcagcatccatgttggaatttaatcgcggcctcgagcaagacgtttcccgttgaatatggctcataacaccccttgtattactgtttatgtaagcagacagttttattgttcatgagcggatacatatttgaatgtatttagaaaaataaacaaataggggttccgcgcacatttccccgaaaagtgccacctaaattgtaagcgttaatattttgttaaaattcgcgttaaatttttgttaaatcagctcattttttaaccaataggccgaaatcggcaaaatcccttataaatcaaaagaatagaccgagatagggttgagtggccgctacagggcgctcccattcgccattcaggctgcgcaactgttgggaagggcgtttcggtgcgggcctcttcgctattacgccagctggcgaaagggggatgtgctgcaaggcgattaagttgggtaacgccagggttttcccagtcac

SEQ ID NO: 114 - DNA, 20 bp, synthetic construct
  source 1..20: mol_type = other DNA
aatgatacggcgaccaccga

SEQ ID NO: 115 - DNA, 20 bp, synthetic construct
  source 1..20: mol_type = other DNA
tcggtggtcgccgtatcatt

SEQ ID NO: 116 - RNA, 3819 nt, synthetic construct
  source 1..3819: mol_type = other RNA
atgttcgtgttcctggtcctcctgcccctggtgagctcccagtgcgtgaacctcaccacccgcacgcagctgccgcccgcctacaccaacagcttcacccggggcgtctactaccccgacaaggtgttccgctccagcgtgctgcactccacccaggacctcttcctgcccttcttcagcaacgtcacgtggttccacgccatccacgtgtccgggaccaacggcaccaagcggttcgacaacccggtgctgcccttcaacgacggggtctacttcgcgagcaccgagaagtccaacatcatccgcggctggatcttcgggacgaccctcgacagcaagacccagtccctgctgatcgtgaacaacgccaccaacgtggtcatcaaggtgtgcgagttccagttctgcaacgaccccttcctcggcgtgtactaccacaagaacaacaagagctggatggagtccgagttccgggtctacagctccgccaacaactgcacgttcgagtacgtgagccagcccttcctgatggacctggagggcaagcaggggaacttcaagaacctccgcgagttcgtgttcaagaacatcgacggctacttcaagatctactccaagcacaccccgatcaacctggtccgggacctgccccaggggttcagcgccctcgagcccctggtggacctgcccatcggcatcaacatcacccgcttccagaccctcctggccctgcaccggtcctacctcacgccgggggacagcagctccggctggaccgcgggcgccgccgcctactacgtggggtacctgcagccccgcaccttcctgctcaagtacaacgagaacggcaccatcacggacgcggtcgactgcgccctggaccccctgagcgagaccaagtgcaccctcaagtccttcaccgtggagaaggggatctaccagacgagcaacttccgggtgcagcccaccgagtccatcgtccgcttcccgaacatcaccaacctgtgccccttcggcgaggtgttcaacgccacccggttcgccagcgtctacgcctggaaccgcaagcggatctccaactgcgtggcggactacagcgtgctgtacaactccgccagcttctccacgttcaagtgctacggcgtcagccccaccaagctcaacgacctgtgcttcaccaacgtgtacgccgactccttcgtgatccgcggggacgaggtccggcagatcgcccccggccagaccgggaagatcgccgactacaactacaagctgccggacgacttcacgggctgcgtgatcgcgtggaacagcaacaacctcgactccaaggtcgggggcaactacaactacctgtaccgcctgttccgcaagagcaacctcaagcccttcgagcgggacatctccaccgagatctaccaggccggcagcaccccctgcaacggggtggagggcttcaactgctacttccccctgcagtcctacgggttccagccgaccaacggcgtggggtaccagccctaccgggtggtcgtgctgagcttcgagctcctgcacgcccccgccacggtgtgcggccccaagaagtccaccaacctggtcaagaacaagtgcgtgaacttcaacttcaacggcctcaccgggaccggcgtgctgaccgagagcaacaagaagttcctgccgttccagcagttcgggcgcgacatcgccgacacgaccgacgcggtccgcgacccccagaccctggagatcctcgacatcaccccctgcagcttcggcggggtgtccgtgatcacgccgggcaccaacaccagcaaccaggtcgccgtgctgtaccaggacgtgaactgcaccgaggtccccgtggccatccacgccgaccagctgacgcccacctggcgggtgtactccaccggcagcaacgtcttccagacccgcgccgggtgcctcatcggcgcggagcacgtgaacaactcctacgagtgcgacatccccatcggggccggcatctgcgccagctaccagacgcagaccaactccccgcggcgcgcccggagcgtggcgtcccagagcatcatcgcctacaccatgtccctgggcgccgagaacagcgtcgcctactccaacaacagcatcgccatccccaccaacttcacgatctccgtgaccaccgagatcctgcccgtgagcatgaccaagacgagcgtcgactgcaccatgtacatctgcggggactccaccgagtgcagcaacctcctgctgcagtacggctccttctgcacccagctcaaccgcgcgctgacggggatcgccgtggagcaggacaagaacacccaggaggtgttcgcccaggtcaagcagatctacaagacgcccccgatcaaggacttcggcgggttcaacttcagccagatcctgcccgacccctccaagcccagcaagcggtccttcatcgaggacctcctgttcaacaaggtgaccctggccgacgccggcttcatcaagcagtacggcgactgcctcggggacatcgcggcccgcgacctgatctgcgcccagaagttcaacggcctgaccgtgctcccgcccctgctgaccgacgagatgatcgcccagtacaccagcgccctcctggcggggaccatcacgtccggctggaccttcggggccggcgccgccctgcagatccccttcgcgatgcagatggcctaccggttcaacggcatcggggtcacccagaacgtgctctacgagaaccagaagctgatcgccaaccagttcaacagcgccatcggcaagatccaggactccctgagctccaccgccagcgcgctcgggaagctgcaggacgtggtcaaccagaacgcccaggccctgaacacgctcgtgaagcagctgtccagcaacttcggcgccatctccagcgtgctgaacgacatcctctcccgcctggacccgcccgaggccgaggtgcagatcgaccggctgatcaccgggcgcctccagagcctgcagacctacgtgacccagcagctgatccgggcggccgagatccgcgccagcgccaacctcgccgcgaccaagatgtccgagtgcgtcctgggccagagcaagcgggtggacttctgcggcaaggggtaccacctgatgtccttcccccagagcgccccgcacggcgtggtcttcctccacgtgacgtacgtccccgcccaggagaagaacttcaccaccgcccccgcgatctgccacgacgggaaggcccacttcccccgcgagggcgtgttcgtgtccaacgggacccactggttcgtcacgcagcggaacttctacgagccgcagatcatcaccaccgacaacaccttcgtgagcggcaactgcgacgtggtcatcggcatcgtgaacaacacggtgtacgaccccctgcagcccgagctggactccttcaaggaggagctcgacaagtacttcaagaaccacaccagccccgacgtcgacctgggggacatctccggcatcaacgccagcgtggtgaacatccagaaggagatcgaccgcctgaacgaggtcgccaagaacctcaacgagtccctgatcgacctgcaggagctcgggaagtacgagcagtacatcaagtggccgtggtacatctggctgggcttcatcgccggcctgatcgcgatcgtgatggtgaccatcatgctctgctgcatgaccagctgctgctcctgcctgaaggggtgctgcagctgcggctcctgctgcaagttcgacgaggacgacagcgagcccgtcctgaagggggtgaagctccactacacg

SEQ ID NO: 117 - RNA, 3822 nt, synthetic construct
  source 1..3822: mol_type = other RNA
atgtttgtgttcctggtgctgctgccactggtgagctctcagtgcgtgaatctgaccacacggacccagctgcccccagcctacaccaactcttttacaaggggagtgtattaccctgacaaggtgtttagatccagcgtgctgcacagcacccaggacctgttcctgccattcttttccaatgtgacatggttccacgccatccacgtgtctggaaccaatggaaccaagagattcgacaaccccgtgctgccctttaatgatggcgtgtacttcgccagcaccgagaaaagcaatatcattcgcgggtggattttcggaaccacactggactctaagacccagagcctgctgattgtgaacaatgccaccaacgtggtgattaaggtgtgtgagtttcagttctgtaatgaccccttcctgggagtgtattaccacaagaacaataaatcctggatggaatccgagttccgcgtgtactcttccgccaacaattgcacatttgagtacgtgtcccagccttttctgatggacctggagggcaagcagggaaattttaagaatctgagagaatttgtgttcaagaacatcgacggctacttcaagatttattctaagcatacacctatcaatctggtgcgcgatctgccacaggggttcagcgccctggaacctctggtggatctgccaattggaatcaatatcacacgcttccagaccctgctggccctgcaccgctcctacctgacacccggcgattctagctctgggtggaccgccggagccgccgcctactatgtgggatacctgcagccccgcaccttcctgctgaagtataatgaaaacggcaccattaccgacgccgtggactgtgccctggacccactgagcgaaaccaagtgcacactgaaatccttcaccgtggaaaaagggatctaccagaccagcaacttccgcgtgcagcctaccgaaagcattgtgcgctttcccaatattacaaacctgtgtccatttggcgaggtgttcaacgccacacgcttcgccagcgtgtatgcctggaaccggaaaagaatcagcaactgtgtggccgattacagcgtgctgtacaatagcgcctctttttccacatttaaatgttacggggtgtcccctacaaagctgaatgacctgtgtttcaccaatgtgtatgccgacagcttcgtgattagaggcgacgaggtgcggcagatcgccccaggacagacaggcaaaattgccgattataactacaaactgccagatgactttaccgggtgcgtgatcgcctggaatagcaacaatctggacagcaaagtggggggcaattacaactatctgtacagactgtttcgcaagtctaacctgaaaccattcgagagggacattagcacagagatctatcaggccggatccacaccatgtaacggcgtggaaggctttaattgttactttcccctgcagtcctatgggtttcagccaacaaatggggtggggtatcagccctacagggtggtggtgctgtcctttgaactgctgcatgcccctgccaccgtgtgcgggcctaagaaatctaccaacctggtgaagaataaatgcgtgaatttcaatttcaatgggctgacagggacaggcgtgctgaccgaatccaataagaaatttctgccattccagcagtttgggagggacatcgccgacacaaccgacgccgtgagggatccacagaccctggaaatcctggatattacaccctgtagcttcggcggggtgtccgtgattacaccagggacaaatacatccaaccaggtggccgtgctgtatcaggacgtgaattgtaccgaagtgcccgtggccatccatgccgaccagctgacacctacctggagggtgtatagcaccggcagcaacgtgttccagacaagagccgggtgcctgattggcgccgagcacgtgaacaatagctatgaatgcgatatcccaatcggcgccgggatctgcgcctcctaccagacccagacaaattcccccggatctgccagctctgtggcctcccagtctattatcgcctataccatgtctctgggcgccgagaacagcgtggcctattctaacaattctattgccattcccacaaatttcacaattagcgtgaccacagaaatcctgcccgtgtctatgacaaagacctccgtggattgtacaatgtatatttgtggcgacagcacagagtgcagcaacctgctgctgcagtacggctctttctgcacacagctgaaccgcgccctgacaggtattgccgtggagcaggataaaaacacacaggaagtgtttgcccaggtgaagcagatttacaaaacaccacccattaaagacttcggcggattcaacttctcccagatcctgcctgaccccagcaaaccttccaagagaagctttatcgaggacctgctgtttaacaaagtgaccctggccgatgccggatttatcaaacagtacggggactgcctgggcgatattgccgccagagatctgatctgtgcccagaaattcaatgggctgaccgtgctgcctcccctgctgaccgacgagatgatcgcccagtacaccagcgccctgctggccggcacaatcacctctggctggaccttcggcgccggcgccgccctgcagatcccatttgccatgcagatggcctacagatttaatgggatcggggtgacacagaacgtgctgtatgagaatcagaagctgattgccaatcagttcaacagcgccatcgggaagattcaggacagcctgtctagcacagcctctgccctgggcaagctgcaggatgtggtgaaccagaacgcccaggccctgaataccctggtgaaacagctgtctagcaatttcggggccattagctccgtgctgaatgatatcctgagccgcctggatccacctgaggccgaagtgcagatcgacaggctgatcaccggccggctgcagagcctgcagacctatgtgacccagcagctgattagagccgccgagatccgggcctccgccaacctggccgccaccaagatgtctgaatgcgtgctgggccagtctaaacgtgtggatttttgtgggaaggggtaccatctgatgagctttccccagagcgccccccacggggtggtgttcctgcacgtgacatacgtgcctgcccaggaaaaaaattttacaaccgcccctgccatctgccacgacggaaaggcccattttccaagagagggcgtgttcgtgtctaacgggacccattggtttgtgacccagcggaacttttacgagccccagatcattaccacagataacacctttgtgagcggaaattgtgatgtggtgattggcattgtgaacaataccgtgtacgatccactgcagcctgagctggactctttcaaggaggaactggacaagtatttcaaaaatcacacatcccctgacgtggatctgggagacattagcgggattaacgcctctgtggtgaatatccagaaggagatcgaccggctgaacgaggtggccaagaatctgaatgagagcctgatcgacctgcaggaactgggaaaatacgagcagtatatcaaatggccttggtacatctggctgggcttcatcgccgggctgatcgccatcgtgatggtgacaatcatgctgtgttgcatgacctcctgctgtagctgcctgaagggctgctgttcctgcggatcttgttgcaaatttgatgaagacgattctgagcccgtgctgaaaggcgtgaaactgcactatacatag

SEQ ID NO: 118 - RNA, 3825 nt, synthetic construct
  source 1..3825: mol_type = other RNA
atgtttgtttttcttgttcttctgccattggtgtcttcccaatgtgtgaacttgactacccgcacacagctcccgccggcgtacactaactccttcacccggggggtttactacccggacaaagtgttccgcagcagtgtcctgcattcaacacaagatttgttccttccattctttagcaatgtcacttggttccatgctatacacgtgagtggcactaacggcactaagcgcttcgataacccggttctgccgtttaatgatggcgtttacttcgcaagtactgagaaatcaaacattatacgggggtggatattcggtactacattggatagtaaaactcaaagccttttgattgtcaacaatgcaactaatgtagtcataaaagtttgtgaattccaattctgtaacgatccctttcttggtgtgtattaccacaagaataacaaatcatggatggagtctgaatttcgagtatacagtagcgccaataattgcacgtttgagtatgtaagccagccgtttctgatggacttggaaggaaagcaaggcaactttaagaacctcagggagttcgtattcaaaaatatagacggttacttcaagatttactcaaaacatacacctatcaacttggtccgagatctcccacaaggtttttcagcgctcgagccattggtggacctgcccatcggaatcaacattacccgattccagacactgcttgcactgcaccggagttatctcacacccggcgacagctcgtctggttggacggcgggagctgccgcttactatgtcggttacttgcaacctcggacatttcttctgaagtataacgaaaacggtacgatcaccgatgccgtagactgcgctctcgatcccctttcagagacgaagtgcacgctcaaatcatttactgtggaaaaaggaatttatcaaacgagcaatttcagggtgcaacccacggagtccatcgtacgattcccaaacataacaaatctttgcccgtttggcgaggtttttaatgctacgcgctttgcatcagtgtacgcttggaataggaaacgaatctcaaattgtgttgcggattattccgtgttgtataattccgcaagcttctccacctttaaatgttatggcgtgtcccccacaaaacttaacgatctttgctttacaaatgtctatgcggattcattcgttatccgaggggatgaagtgcgacaaatcgctcctgggcagacagggaagatagctgattacaattacaaacttccagacgattttacaggatgtgtaatcgcgtggaactcaaacaatttggacagtaaggttggtggcaactacaattatctgtatagacttttcagaaaaagtaacctcaaacctttcgaacgcgacattagcactgagatataccaggccggatcaactccttgtaacggtgttgaaggtttcaactgttactttccgctccaatcctacggctttcaaccaacgaacggtgtcgggtaccaaccatacagagttgtcgtcttgagttttgagcttttgcacgcacctgcaaccgtgtgtggtccgaagaaaagtactaatctggttaaaaataaatgcgtcaatttcaactttaatgggttgacgggcacaggcgtgctgacagagtccaataaaaagtttttgccctttcagcagtttgggagggacatcgccgatacgaccgatgccgtccgagatcctcaaacccttgaaatattggacattaccccctgtagttttggcggtgtaagtgtgattactcccggaacgaatacatctaaccaggtagcggtgctttatcaagatgtcaactgtacagaggtccccgtggcgattcacgccgatcagttgacacccacatggagggtttacagcacaggatccaacgtcttccagacgagagcaggatgcttgatcggtgccgagcatgtgaataacagctacgaatgtgacattccgattggtgctggaatctgcgcaagttaccaaactcaaacgaattcccctggctccgcctcctctgtggcatcccagtctataatcgcgtatacgatgtcactgggcgccgagaattctgtcgcatatagcaacaactccatcgcaatacccacaaattttacaatttctgtgaccacggaaattctgcccgtcagcatgacaaaaactagcgtggactgcacgatgtatatctgcggcgactccacagagtgttccaacctcctcttgcaatatggcagcttttgcacacaattgaaccgagcgctcaccgggatagcggtcgagcaagataagaatacccaagaggtgtttgcccaggtgaagcaaatctataagacccctccaataaaggattttggcggcttcaatttctcacaaattttgcccgatccatctaagccgtccaagcgatcatttattgaggatctgctgttcaacaaagtcactctcgccgacgcggggtttattaaacaatatggcgattgcctgggcgacatcgccgccagggaccttatatgcgcccagaagttcaacggtctcaccgtgctgccaccattgttgactgacgaaatgatcgcacagtatacgtcagcgctgctggctggtaccattacttctggctggacattcggagccggtgcagcccttcagattccatttgcaatgcagatggcctatagatttaatggaataggagtgacgcagaacgtattgtacgagaatcaaaagttgatcgcaaaccagttcaattctgccattggaaagatacaagattccctttcttctaccgcctcagccctgggtaagttgcaagatgtcgtcaaccaaaatgcacaggctttgaataccttggtaaaacaattgtcatccaatttcggcgccataagctcagtacttaacgatatcttgtcacgattggatccccccgaagccgaggtccaaatcgataggctcatcacgggacggctccagagccttcaaacctatgtgacgcaacaactgatacgggccgcagaaatccgagcgtccgccaacttggcagctaccaagatgtccgaatgtgtactgggtcaatcaaagagagttgatttctgtggaaaaggataccatctcatgtcattcccccaaagcgccccgcacggcgtcgtgttcctccatgtgacttacgttccagcacaagaaaaaaacttcacaactgcgcccgctatctgccatgacgggaaggcgcacttcccacgagagggtgtatttgtgtcaaatggaacgcactggttcgtaacgcaaaggaacttctatgaaccgcagataatcacgactgacaacacttttgtatctggcaattgtgatgtggtcatcgggatagttaacaacactgtctatgacccgctgcaacccgagcttgattcatttaaagaagaactcgataaatatttcaagaatcacaccagtcccgatgtggaccttggagacatttccgggataaatgcctctgtggtaaacatccaaaaggaaatcgatcggctgaatgaagtggccaaaaacttgaacgaaagtctgatagaccttcaggagctcgggaagtatgaacaatacataaagtggccatggtacatctggcttgggttcatcgctggcctcatagccatcgttatggttaccatcatgctctgctgtatgacttcctgttgttcctgtctcaaagggtgttgcagctgtggtagctgctgcaaatttgacgaggatgactcagaacccgtcttgaagggagtcaagttgcactacacttagtaa

SEQ ID NO: 119 - RNA, 3894 nt, synthetic construct
  source 1..3894: mol_type = other RNA
agaagctgtctatcgggctccagcggtcatgttcgtgtttctggtgctgctgcccctggtgagcagccagtgcgtgaacctgatcaccaggacccagagttacaccaacagcttcacccggggcgtgtactaccccgacaaggtgttcaggagcagcgtgctgcacagcacccaggacctgttcctgcccttcttcagcaacgtgacctggttccacgccatcagcggcaccaacggcaccaagcggttcgacaaccccgtgttgcccttcaacgacggcgtgtacttcgccagcaccgagaagagtaacatcatccggggctggatcttcggcaccaccctggactccaagacccagagcctgctgatcgtgaacaacgccaccaacgtggtgatcaaggtgtgcgagtttcagttctgcaacgaccccttcctggacgtgtactaccacaagaacaacaagagctggatggagagcgagttcagggtgtacagcagcgccaacaactgcaccttcgagtacgtgagccagcccttcctgatggacctggagggcaaacagggcaacttcaagaacctgcgggagttcgtgttcaagaatatcgacggctacttcaagatctacagcaagcacacccccatcaacctgggcagggacctgccccagggcttcagcgccctggagcccctggtggacctgcccatcggcatcaacatcacccggttccagaccctgctggccctgcaccggagctacctgacccccggcgacagcagcagcggctggaccgccggcgccgccgcctactacgtgggctacctgcagcccaggaccttcctgctgaagtacaacgagaacggcaccatcaccgacgccgtggactgtgccctggaccccctgagcgagaccaagtgcaccctgaagagtttcaccgtggagaagggcatctaccagaccagcaacttcagggtgcagcccaccgagagcatcgtgaggttccccaacatcaccaacctgtgccccttcgacgaggtgttcaacgccacccggttcgccagcgtgtacgcctggaaccggaagcggatcagcaactgcgtggccgactacagcgtgctgtacaacttcgcccccttcttcgccttcaagtgctacggcgtgagccccaccaaactgaacgacctatgcttcaccaacgtgtacgccgacagcttcgtgatcaggggtaacgaggtgagccagatcgcccccggccagaccggcaacatcgccgactacaactacaagctgcccgacgacttcaccggctgcgtgatcgcctggaacagcaacaagctggacagcaaggtgggcggcaactacaactaccggtacaggctgttccggaagagtaacctgaagcccttcgagagggacatcagcaccgagatctaccaagccggcaacaagccctgcaacggcgtggccggcgtgaactgctacttccccctgcagagctacggcttccggcccacctacggcgtgggccaccagccctaccgggtggtggtgctgagcttcgagctgctgcacgcccccgccaccgtgtgcggccccaagaagagtaccaacctggtgaagaataagtgcgtgaacttcaacttcaacggcctgaccggcaccggcgtgctgaccgagagcaacaagaagttcctgcccttccagcagttcggcagggacatcgccgacaccaccgacgccgtgcgggacccccagaccctggagatcctggacatcaccccctgcagcttcggcggcgtgagcgtgatcacccccggcaccaacaccagcaaccaggtggccgtgctgtaccagggcgtgaactgcaccgaggtgcccgtggccatccacgccgaccagctgacccccacctggcgggtgtacagcaccggcagcaacgtgttccagacccgagccggctgcctgatcggcgccgagtacgtgaacagcagctacgagtgcgacatccccatcggcgccggcatctgcgccagctaccagacacagaccaagagccacaggcgggcccggagcgtggccagccagagcatcatcgcctacaccatgagcctgggcgccgagaacagcgtcgcctacagcaacaacagcatcgccatcccgaccaacttcaccatcagcgtgaccaccgagatcctgcccgtgagcatgaccaagaccagcgtggactgcaccatgtacatctgcggcgacagcaccgagtgcagcaacctgctgctgcagtacggcagcttctgcacccagctgaagcgagccctgaccggcatcgccgtggagcaggacaagaacacccaggaggtgttcgcccaggtgaagcagatctacaagaccccccccataaagtacttcggcggcttcaacttcagccagatcctgcctgaccccagcaagcccagcaagcggagcttcatcgaggacctgctgttcaacaaggtgaccctggccgacgccggcttcatcaagcagtacggcgactgcctgggcgacatcgccgcccgggacctgatatgcgcccagaagttcaacggcctgaccgtgctgccccccctgctgaccgacgagatgatcgcccagtacaccagcgccctgctggccggcaccatcaccagcggctggacgttcggcgccggcgccgccctgcagatccccttcgccatgcagatggcctaccgcttcaacggcatcggcgtgacccagaacgtgctgtacgagaaccagaagctgatcgccaaccagttcaacagcgccatcggcaagatccaggacagcctgagcagcaccgccagcgccctgggcaagctgcaggacgtggtgaaccacaacgcccaggccctgaacaccctggtgaagcagctgagcagcaagttcggcgccatcagcagcgtgctgaacgacatcctgagccggctggacccccccgaggcggaggtgcagatcgacagactgatcaccggccggctgcagagcctgcagacctacgtgacccagcagctgatccgggccgccgagatccgggccagcgccaacctggccgccaccaagatgagcgagtgcgtgctgggccagtccaagcgggtggacttctgcggcaagggctaccacctgatgagcttcccccagagcgccccccacggcgtggtgttcctgcacgtgacctacgtgcccgcccaggagaagaacttcaccaccgcccccgccatctgccacgacggcaaggcccacttcccccgggagggcgtgttcgtgagcaacggcacccactggttcgtgacccagcggaacttctatgagccccagatcatcaccaccgacaacaccttcgtgagcggcaattgcgacgtggtgatcggcatcgtgaacaacaccgtgtacgaccccctgcagcccgagctggacagcttcaaggaggagctggacaagtacttcaagaaccacaccagccccgacgtggacctgggcgacatcagcggcatcaatgccagcgtggtgaacatccagaaggagatcgacaggctgaacgaggtggccaagaacctgaacgagagcctgatcgacctgcaggagctgggcaagtacgagcagtacatcaagtggccctggtacatctggctgggcttcatcgccggcctgatcgcaatcgtgatggtgaccatcatgctgtgctgcatgaccagctgctgcagctgcctgaagggctgctgcagctgcggcagctgctgcaagttcgacgaggacgacagcgagcccgtgctgaagggcgtgaagctgcactacacctgataagccgccgctccagctttgcacgtttcgatcccaaaggccctttttagggccgacca

SEQ ID NO: 120 - RNA, 3908 nt, synthetic construct
  source 1..3908: mol_type = other RNA
agaagctgtctatcgggctccagcggtcatgttcgtgtttctggtgctgctgcccctggtgagcagccagtgcgtgaacctgatcaccaggacccagagttacaccaacagcttcacccggggcgtgtactaccccgacaaggtgttcaggagcagcgtgctgcacagcacccaggacctgttcctgcccttcttcagcaacgtgacctggttccacgccatcagcggcaccaacggcaccaagcggttcgacaaccccgtgttgcccttcaacgacggcgtgtacttcgccagcaccgagaagagtaacatcatccggggctggatcttcggcaccaccctggactccaagacccagagcctgctgatcgtgaacaacgccaccaacgtggtgatcaaggtgtgcgagtttcagttctgcaacgaccccttcctggacgtgtactaccacaagaacaacaagagctggatggagagcgagttcagggtgtacagcagcgccaacaactgcaccttcgagtacgtgagccagcccttcctgatggacctggagggcaaacagggcaacttcaagaacctgcgggagttcgtgttcaagaatatcgacggctacttcaagatctacagcaagcacacccccatcaacctgggcagggacctgccccagggcttcagcgccctggagcccctggtggacctgcccatcggcatcaacatcacccggttccagaccctgctggccctgcaccggagctacctgacccccggcgacagcagcagcggctggaccgccggcgccgccgcctactacgtgggctacctgcagcccaggaccttcctgctgaagtacaacgagaacggcaccatcaccgacgccgtggactgtgccctggaccccctgagcgagaccaagtgcaccctgaagagtttcaccgtggagaagggcatctaccagaccagcaacttcagggtgcagcccaccgagagcatcgtgaggttccccaacatcaccaacctgtgccccttcgacgaggtgttcaacgccacccggttcgccagcgtgtacgcctggaaccggaagcggatcagcaactgcgtggccgactacagcgtgctgtacaacttcgcccccttcttcgccttcaagtgctacggcgtgagccccaccaaactgaacgacctatgcttcaccaacgtgtacgccgacagcttcgtgatcaggggtaacgaggtgagccagatcgcccccggccagaccggcaacatcgccgactacaactacaagctgcccgacgacttcaccggctgcgtgatcgcctggaacagcaacaagctggacagcaaggtgggcggcaactacaactaccggtacaggctgttccggaagagtaacctgaagcccttcgagagggacatcagcaccgagatctaccaagccggcaacaagccctgcaacggcgtggccggcgtgaactgctacttccccctgcagagctacggcttccggcccacctacggcgtgggccaccagccctaccgggtggtggtgctgagcttcgagctgctgcacgcccccgccaccgtgtgcggccccaagaagagtaccaacctggtgaagaataagtgcgtgaacttcaacttcaacggcctgaccggcaccggcgtgctgaccgagagcaacaagaagttcctgcccttccagcagttcggcagggacatcgccgacaccaccgacgccgtgcgggacccccagaccctggagatcctggacatcaccccctgcagcttcggcggcgtgagcgtgatcacccccggcaccaacaccagcaaccaggtggccgtgctgtaccagggcgtgaactgcaccgaggtgcccgtggccatccacgccgaccagctgacccccacctggcgggtgtacagcaccggcagcaacgtgttccagacccgagccggctgcctgatcggcgccgagtacgtgaacagcagctacgagtgcgacatccccatcggcgccggcatctgcgccagctaccagacacagaccaagagccacaggcgggcccggagcgtggccagccagagcatcatcgcctacaccatgagcctgggcgccgagaacagcgtcgcctacagcaacaacagcatcgccatcccgaccaacttcaccatcagcgtgaccaccgagatcctgcccgtgagcatgaccaagaccagcgtggactgcaccatgtacatctgcggcgacagcaccgagtgcagcaacctgctgctgcagtacggcagcttctgcacccagctgaagcgagccctgaccggcatcgccgtggagcaggacaagaacacccaggaggtgttcgcccaggtgaagcagatctacaagaccccccccataaagtacttcggcggcttcaacttcagccagatcctgcctgaccccagcaagcccagcaagcggagcttcatcgaggacctgctgttcaacaaggtgaccctggccgacgccggcttcatcaagcagtacggcgactgcctgggcgacatcgccgcccgggacctgatatgcgcccagaagttcaacggcctgaccgtgctgccccccctgctgaccgacgagatgatcgcccagtacaccagcgccctgctggccggcaccatcaccagcggctggacgttcggcgccggcgccgccctgcagatccccttcgccatgcagatggcctaccgcttcaacggcatcggcgtgacccagaacgtgctgtacgagaaccagaagctgatcgccaaccagttcaacagcgccatcggcaagatccaggacagcctgagcagcaccgccagcgccctgggcaagctgcaggacgtggtgaaccacaacgcccaggccctgaacaccctggtgaagcagctgagcagcaagttcggcgccatcagcagcgtgctgaacgacatcctgagccggctggacccccccgaggcggaggtgcagatcgacagactgatcaccggccggctgcagagcctgcagacctacgtgacccagcagctgatccgggccgccgagatccgggccagcgccaacctggccgccaccaagatgagcgagtgcgtgctgggccagtccaagcgggtggacttctgcggcaagggctaccacctgatgagcttcccccagagcgccccccacggcgtggtgttcctgcacgtgacctacgtgcccgcccaggagaagaacttcaccaccgcccccgccatctgccacgacggcaaggcccacttcccccgggagggcgtgttcgtgagcaacggcacccactggttcgtgacccagcggaacttctatgagccccagatcatcaccaccgacaacaccttcgtgagcggcaattgcgacgtggtgatcggcatcgtgaacaacaccgtgtacgaccccctgcagcccgagctggacagcttcaaggaggagctggacaagtacttcaagaaccacaccagccccgacgtggacctgggcgacatcagcggcatcaatgccagcgtggtgaacatccagaaggagatcgacaggctgaacgaggtggccaagaacctgaacgagagcctgatcgacctgcaggagctgggcaagtacgagcagtacatcaagtggccctggtacatctggctgggcttcatcgccggcctgatcgcaatcgtgatggtgaccatcatgctgtgctgcatgaccagctgctgcagctgcctgaagggctgctgcagctgcggcagctgctgcaagttcgacgaggacgacagcgagcccgtgctgaagggcgtgaagctgcactacacctgataatctagagccgccgctccagctttgcacgtttcgatcccaaaggccctttttagggccgaccattcattgc

SEQ ID NO: 121 - RNA, 3989 nt, synthetic construct
  source 1..3989: mol_type = other RNA
aggagaagctgtctatcgggctccagcggtcatgttcgtgtttctggtgctgctgcccctggtgagcagccagtgcgtgaacctgatcaccaggacccagagttacaccaacagcttcacccggggcgtgtactaccccgacaaggtgttcaggagcagcgtgctgcacagcacccaggacctgttcctgcccttcttcagcaacgtgacctggttccacgccatcagcggcaccaacggcaccaagcggttcgacaaccccgtgttgcccttcaacgacggcgtgtacttcgccagcaccgagaagagtaacatcatccggggctggatcttcggcaccaccctggactccaagacccagagcctgctgatcgtgaacaacgccaccaacgtggtgatcaaggtgtgcgagtttcagttctgcaacgaccccttcctggacgtgtactaccacaagaacaacaagagctggatggagagcgagttcagggtgtacagcagcgccaacaactgcaccttcgagtacgtgagccagcccttcctgatggacctggagggcaaacagggcaacttcaagaacctgcgggagttcgtgttcaagaatatcgacggctacttcaagatctacagcaagcacacccccatcaacctgggcagggacctgccccagggcttcagcgccctggagcccctggtggacctgcccatcggcatcaacatcacccggttccagaccctgctggccctgcaccggagctacctgacccccggcgacagcagcagcggctggaccgccggcgccgccgcctactacgtgggctacctgcagcccaggaccttcctgctgaagtacaacgagaacggcaccatcaccgacgccgtggactgtgccctggaccccctgagcgagaccaagtgcaccctgaagagtttcaccgtggagaagggcatctaccagaccagcaacttcagggtgcagcccaccgagagcatcgtgaggttccccaacatcaccaacctgtgccccttcgacgaggtgttcaacgccacccggttcgccagcgtgtacgcctggaaccggaagcggatcagcaactgcgtggccgactacagcgtgctgtacaacttcgcccccttcttcgccttcaagtgctacggcgtgagccccaccaaactgaacgacctatgcttcaccaacgtgtacgccgacagcttcgtgatcaggggtaacgaggtgagccagatcgcccccggccagaccggcaacatcgccgactacaactacaagctgcccgacgacttcaccggctgcgtgatcgcctggaacagcaacaagctggacagcaaggtgggcggcaactacaactaccggtacaggctgttccggaagagtaacctgaagcccttcgagagggacatcagcaccgagatctaccaagccggcaacaagccctgcaacggcgtggccggcgtgaactgctacttccccctgcagagctacggcttccggcccacctacggcgtgggccaccagccctaccgggtggtggtgctgagcttcgagctgctgcacgcccccgccaccgtgtgcggccccaagaagagtaccaacctggtgaagaataagtgcgtgaacttcaacttcaacggcctgaccggcaccggcgtgctgaccgagagcaacaagaagttcctgcccttccagcagttcggcagggacatcgccgacaccaccgacgccgtgcgggacccccagaccctggagatcctggacatcaccccctgcagcttcggcggcgtgagcgtgatcacccccggcaccaacaccagcaaccaggtggccgtgctgtaccagggcgtgaactgcaccgaggtgcccgtggccatccacgccgaccagctgacccccacctggcgggtgtacagcaccggcagcaacgtgttccagacccgagccggctgcctgatcggcgccgagtacgtgaacagcagctacgagtgcgacatccccatcggcgccggcatctgcgccagctaccagacacagaccaagagccacaggcgggcccggagcgtggccagccagagcatcatcgcctacaccatgagcctgggcgccgagaacagcgtcgcctacagcaacaacagcatcgccatcccgaccaacttcaccatcagcgtgaccaccgagatcctgcccgtgagcatgaccaagaccagcgtggactgcaccatgtacatctgcggcgacagcaccgagtgcagcaacctgctgctgcagtacggcagcttctgcacccagctgaagcgagccctgaccggcatcgccgtggagcaggacaagaacacccaggaggtgttcgcccaggtgaagcagatctacaagaccccccccataaagtacttcggcggcttcaacttcagccagatcctgcctgaccccagcaagcccagcaagcggagcttcatcgaggacctgctgttcaacaaggtgaccctggccgacgccggcttcatcaagcagtacggcgactgcctgggcgacatcgccgcccgggacctgatatgcgcccagaagttcaacggcctgaccgtgctgccccccctgctgaccgacgagatgatcgcccagtacaccagcgccctgctggccggcaccatcaccagcggctggacgttcggcgccggcgccgccctgcagatccccttcgccatgcagatggcctaccgcttcaacggcatcggcgtgacccagaacgtgctgtacgagaaccagaagctgatcgccaaccagttcaacagcgccatcggcaagatccaggacagcctgagcagcaccgccagcgccctgggcaagctgcaggacgtggtgaaccacaacgcccaggccctgaacaccctggtgaagcagctgagcagcaagttcggcgccatcagcagcgtgctgaacgacatcctgagccggctggacccccccgaggcggaggtgcagatcgacagactgatcaccggccggctgcagagcctgcagacctacgtgacccagcagctgatccgggccgccgagatccgggccagcgccaacctggccgccaccaagatgagcgagtgcgtgctgggccagtccaagcgggtggacttctgcggcaagggctaccacctgatgagcttcccccagagcgccccccacggcgtggtgttcctgcacgtgacctacgtgcccgcccaggagaagaacttcaccaccgcccccgccatctgccacgacggcaaggcccacttcccccgggagggcgtgttcgtgagcaacggcacccactggttcgtgacccagcggaacttctatgagccccagatcatcaccaccgacaacaccttcgtgagcggcaattgcgacgtggtgatcggcatcgtgaacaacaccgtgtacgaccccctgcagcccgagctggacagcttcaaggaggagctggacaagtacttcaagaaccacaccagccccgacgtggacctgggcgacatcagcggcatcaatgccagcgtggtgaacatccagaaggagatcgacaggctgaacgaggtggccaagaacctgaacgagagcctgatcgacctgcaggagctgggcaagtacgagcagtacatcaagtggccctggtacatctggctgggcttcatcgccggcctgatcgcaatcgtgatggtgaccatcatgctgtgctgcatgaccagctgctgcagctgcctgaagggctgctgcagctgcggcagctgctgcaagttcgacgaggacgacagcgagcccgtgctgaagggcgtgaagctgcactacacctgataatctagagccgccgctccagctttgcacgtttcgatcccaaaggccctttttagggccgaccattcattgcaaaaaaaaaaaaaaaaaaaaaaaaaaaaaagcatatgactaaaaaaaaaaaaaaaaaaaaaaaaaaaaaaaaaaaaaa

SEQ ID NO: 122 - RNA, 3804 nt, synthetic construct
  source 1..3804: mol_type = other RNA
atgttcgtgtttctggtgctgctgcccctggtgagcagccagtgcgtgaacctgatcaccaggacccagagttacaccaacagcttcacccggggcgtgtactaccccgacaaggtgttcaggagcagcgtgctgcacagcacccaggacctgttcctgcccttcttcagcaacgtgacctggttccacgccatcagcggcaccaacggcaccaagcggttcgacaaccccgtgttgcccttcaacgacggcgtgtacttcgccagcaccgagaagagtaacatcatccggggctggatcttcggcaccaccctggactccaagacccagagcctgctgatcgtgaacaacgccaccaacgtggtgatcaaggtgtgcgagtttcagttctgcaacgaccccttcctggacgtgtactaccacaagaacaacaagagctggatggagagcgagttcagggtgtacagcagcgccaacaactgcaccttcgagtacgtgagccagcccttcctgatggacctggagggcaaacagggcaacttcaagaacctgcgggagttcgtgttcaagaatatcgacggctacttcaagatctacagcaagcacacccccatcaacctgggcagggacctgccccagggcttcagcgccctggagcccctggtggacctgcccatcggcatcaacatcacccggttccagaccctgctggccctgcaccggagctacctgacccccggcgacagcagcagcggctggaccgccggcgccgccgcctactacgtgggctacctgcagcccaggaccttcctgctgaagtacaacgagaacggcaccatcaccgacgccgtggactgtgccctggaccccctgagcgagaccaagtgcaccctgaagagtttcaccgtggagaagggcatctaccagaccagcaacttcagggtgcagcccaccgagagcatcgtgaggttccccaacatcaccaacctgtgccccttcgacgaggtgttcaacgccacccggttcgccagcgtgtacgcctggaaccggaagcggatcagcaactgcgtggccgactacagcgtgctgtacaacttcgcccccttcttcgccttcaagtgctacggcgtgagccccaccaaactgaacgacctatgcttcaccaacgtgtacgccgacagcttcgtgatcaggggtaacgaggtgagccagatcgcccccggccagaccggcaacatcgccgactacaactacaagctgcccgacgacttcaccggctgcgtgatcgcctggaacagcaacaagctggacagcaaggtgggcggcaactacaactaccggtacaggctgttccggaagagtaacctgaagcccttcgagagggacatcagcaccgagatctaccaagccggcaacaagccctgcaacggcgtggccggcgtgaactgctacttccccctgcagagctacggcttccggcccacctacggcgtgggccaccagccctaccgggtggtggtgctgagcttcgagctgctgcacgcccccgccaccgtgtgcggccccaagaagagtaccaacctggtgaagaataagtgcgtgaacttcaacttcaacggcctgaccggcaccggcgtgctgaccgagagcaacaagaagttcctgcccttccagcagttcggcagggacatcgccgacaccaccgacgccgtgcgggacccccagaccctggagatcctggacatcaccccctgcagcttcggcggcgtgagcgtgatcacccccggcaccaacaccagcaaccaggtggccgtgctgtaccagggcgtgaactgcaccgaggtgcccgtggccatccacgccgaccagctgacccccacctggcgggtgtacagcaccggcagcaacgtgttccagacccgagccggctgcctgatcggcgccgagtacgtgaacagcagctacgagtgcgacatccccatcggcgccggcatctgcgccagctaccagacacagaccaagagccacaggcgggcccggagcgtggccagccagagcatcatcgcctacaccatgagcctgggcgccgagaacagcgtcgcctacagcaacaacagcatcgccatcccgaccaacttcaccatcagcgtgaccaccgagatcctgcccgtgagcatgaccaagaccagcgtggactgcaccatgtacatctgcggcgacagcaccgagtgcagcaacctgctgctgcagtacggcagcttctgcacccagctgaagcgagccctgaccggcatcgccgtggagcaggacaagaacacccaggaggtgttcgcccaggtgaagcagatctacaagaccccccccataaagtacttcggcggcttcaacttcagccagatcctgcctgaccccagcaagcccagcaagcggagcttcatcgaggacctgctgttcaacaaggtgaccctggccgacgccggcttcatcaagcagtacggcgactgcctgggcgacatcgccgcccgggacctgatatgcgcccagaagttcaacggcctgaccgtgctgccccccctgctgaccgacgagatgatcgcccagtacaccagcgccctgctggccggcaccatcaccagcggctggacgttcggcgccggcgccgccctgcagatccccttcgccatgcagatggcctaccgcttcaacggcatcggcgtgacccagaacgtgctgtacgagaaccagaagctgatcgccaaccagttcaacagcgccatcggcaagatccaggacagcctgagcagcaccgccagcgccctgggcaagctgcaggacgtggtgaaccacaacgcccaggccctgaacaccctggtgaagcagctgagcagcaagttcggcgccatcagcagcgtgctgaacgacatcctgagccggctggacccccccgaggcggaggtgcagatcgacagactgatcaccggccggctgcagagcctgcagacctacgtgacccagcagctgatccgggccgccgagatccgggccagcgccaacctggccgccaccaagatgagcgagtgcgtgctgggccagtccaagcgggtggacttctgcggcaagggctaccacctgatgagcttcccccagagcgccccccacggcgtggtgttcctgcacgtgacctacgtgcccgcccaggagaagaacttcaccaccgcccccgccatctgccacgacggcaaggcccacttcccccgggagggcgtgttcgtgagcaacggcacccactggttcgtgacccagcggaacttctatgagccccagatcatcaccaccgacaacaccttcgtgagcggcaattgcgacgtggtgatcggcatcgtgaacaacaccgtgtacgaccccctgcagcccgagctggacagcttcaaggaggagctggacaagtacttcaagaaccacaccagccccgacgtggacctgggcgacatcagcggcatcaatgccagcgtggtgaacatccagaaggagatcgacaggctgaacgaggtggccaagaacctgaacgagagcctgatcgacctgcaggagctgggcaagtacgagcagtacatcaagtggccctggtacatctggctgggcttcatcgccggcctgatcgcaatcgtgatggtgaccatcatgctgtgctgcatgaccagctgctgcagctgcctgaagggctgctgcagctgcggcagctgctgcaagttcgacgaggacgacagcgagcccgtgctgaagggcgtgaagctgcactacacc

SEQ ID NO: 123 - RNA, 3816 nt, synthetic construct
  source 1..3816: mol_type = other RNA
atgttcgtgttcctggtgctgctgcctctggtgagcagccagtgcgtgaacctgaccacacgcacccagctgccaccggcttacaccaacagcttcacccgcggggtgtactaccccgacaaggtgttcaggtccagtgtgctgcacagcacacaggacctgttcctgcccttcttcagcaacgtgacttggttccatgtgatcagcggcaccaatgggaccaagcgcttcgacaaccccgtgctgccattcaatgacggcgtgtacttcgccagcatcgagaagagtaacatcatcaggggctggatcttcggcaccaccctcgacagcaagacccagtctctgctgatcgtgaacaacgccacgaacgtggtgattaaggtgtgcgagttccagttctgtaatgatcccttcctggatcacaagaataataaatcctggatggagtccgagttcagggtgtactccagcgccaacaattgcaccttcgagtacgtgtcccagcccttcctgatggacctggagggcaagcaggggaacttcaagaatctgagagagttcgtgttcaagaacatcgatggatacttcaagatctactcgaagcacacccccatcatcgtgagggagccagaggacctgccccaggggttcagcgctctggagccactggtggacctgccaatcgggattaatatcaccaggttccagaccctgctggctctgcaccggagctacctgacccctggggacagctcctctggctggaccgccggggctgcggcctactacgtgggctacctgcagccccggacattcctgctgaagtacaacgagaatgggaccatcacggacgctgtggactgcgcgctggaccctctgtccgagaccaagtgtacactgaagagtttcaccgtggagaaggggatctaccagacctccaacttcagggtgcagccgaccgagagcattgtgcgcttcccaaatatcaccaacctgtgccccttcgacgaggtgttcaatgccactcggttcgcttcagtgtacgcttggaatcggaagaggatctccaactgcgtggcggactacagcgtcctgtacaacctggccccattcttcaccttcaagtgctacggggtgtcccccacaaagctgaacgacctgtgcttcactaatgtgtacgcggacagctttgtgatccgcggcgatgaggtgcggcagattgcccccggccagactgggaacatcgccgactacaactacaagctgccagacgacttcaccggctgcgtgatcgcctggaacagcaacaagctggactccaaggtgtctggcaactataactacctgtatcggctgttccggaagagtaacctgaagcccttcgagcgggacatctccaccgagatctaccaggctggaaataagccatgcaacggcgtggcgggcttcaattgctacttccccctgcgctcttacagcttcaggcccacatacggggtggggcaccagccctacagggtggtggtgctgagcttcgagctcctgcacgcccccgccaccgtgtgtgggccgaagaagagtacaaacctggtgaagaacaagtgcgtgaacttcaacttcaacgggctgaaagggacaggagtgctgacagagtccaacaagaaattcctgccctttcagcagtttggacgggacatcgccgacaccaccgacgccgtgagggatccccagaccctggagatcctggacatcacaccctgtagcttcgggggggtgtctgtgatcacgcctgggacaaacacctccaaccaggtggctgtgctgtaccagggcgtgaattgcactgaggtgccagtggcgattcacgccgaccagctgacacccacctggcgggtgtactctaccggctccaatgtgttccagaccagggccggctgcctgatcggggctgagtacgtgaacaacagctacgaatgcgacatccccatcggggccggcatttgtgccagctaccagacacagaccaagtcccacaggcgggcccggagcgtggcctcccagagcatcatcgcctacacaatgagcctgggggccgagaactccgtggcctacagcaacaactccatcgctatccccacaaacttcacaatcagcgtgaccacagagatcctgcctgtctctatgaccaagacctctgtggactgcaccatgtacatctgtggggatagcaccgagtgcagcaacctgctgctgcagtacggcagcttctgcactcagctgaagcgggccctgactgggatcgccgtggagcaggacaagaatacccaggaggtgtttgcccaggtgaagcagatctacaagacaccccccatcaagtacttcggcgggttcaacttctctcagattctgccagaccccagcaagccctccaagcggtccttcattgaggacctgctgtttaacaaggtgaccctggccgacgccgggttcatcaagcagtacggggactgcctgggcgacatcgccgcccgcgacctcatctgtgcgcagaagtttaaggggctgaccgtgctgccccccctgctgacagatgagatgatcgcccagtacacctccgcgctgctggctgggaccatcacctcggggtggacttttggcgctggagccgcgctgcagatccccttcgccatgcagatggcctatcggttcaacgggatcggggtgacacagaacgtgctgtacgagaaccagaagctgatcgccaatcagtttaacagcgccatcgggaagattcaggacagcctgagctccacagcttccgccctggggaagctgcaggatgtggtgaaccacaacgctcaggccctgaacaccctggtgaagcagctgagctccaagtttggggccatctccagcgtgctgaacgacatcttcagcaggctggacccacccgaggccgaggtccagatcgaccggctcatcacggggcggctgcagagcctgcagacctacgtgactcagcagctcatcagagctgctgagatcagggcttctgccaacctggccgccaccaagatgagcgagtgcgtgctgggccagagcaagcgggtggacttctgtgggaagggctaccacctgatgtccttcccacagagcgccccccacggggtggtgttcctgcacgtgacctacgtgcccgctcaggagaagaacttcaccaccgccccggccatttgccacgacggcaaggcccacttccccagggagggcgtgttcgtgtccaacgggacacactggttcgtgacacagcgcaacttctatgagccccagatcatcacaaccgacaacacattcgtgagcgggaactgcgacgtggtgatcgggatcgtgaacaacaccgtgtacgatcccctgcagcctgagctggactccttcaaggaagaactggacaagtacttcaagaaccacacctccccagacgtggatctgggggacatcagcggcatcaacgccagcgtggtgaacatccagaaggagatcgaccggctgaacgaggtggccaagaatctgaatgagtccctgatcgacctccaggagctggggaagtacgagcagtacatcaagtggccctggtacatctggctggggttcatcgccgggctgatcgccatcgtgatggtgaccatcatgctgtgctgcatgaccagctgctgcagctgcctgaaaggctgctgcagctgcgggtcgtgctgcaagttcgacgaggacgacagcgagcccgtgttgaaaggagtgaaactgcactacacctgataa

SEQ ID NO: 124 - RNA, 3816 nt, synthetic construct
  source 1..3816: mol_type = other RNA
atgttcgtgttcctggtgctgctccccctggtcagctcacagtgcgtgaacctgaccactcgcacacagctgcccccagcttacactaactccttcacccgcggggtgtactaccccgacaaggtgttcaggagtagtgtgctgcacagcacccaggacctctttctcccattcttctccaacgtcacgtggttccacgtgatcagcgggacaaatgggacaaagaggttcgacaaccctgtgctgcccttcaacgatggggtgtacttcgcctccatcgagaagagtaacatcatcaggggctggatctttgggaccaccctggactcaaagacccagtccctgctgatcgtgaacaacgccaccaatgtggtcatcaaggtgtgcgagttccagttctgcaacgatccattcctggatcacaaaaacaacaagagctggatggagagtgagttccgggtgtacagcagcgcgaacaactgcacgttcgaatacgtgtcacagccattcctgatggacctggaggggaagcagggcaattttaagaacctgcgcgagttcgtcttcaagaacatcgacgggtattttaagatctactccaagcacacacccatcatcgtcagggagcccgaggatctgccccagggcttctctgccctggagccgctggtggacctccccataggaattaacatcaccaggttccagacactcctggccctgcacaggagctacctgacacctggtgacagttccagtgggtggacggccggggctgcagcctactacgtgggctacctgcagccccggaccttcctgctgaagtacaacgagaatgggaccattacagacgctgtggactgcgcactggatcctctgtccgagaccaagtgtacactgaagagtttcaccgtggagaaggggatctaccagacctccaacttcagggtgcagccgaccgagagcattgtgcgcttcccaaatatcacaaacctgtgccccttcgacgaggtgttcaatgctactcggttcgcttcagtgtacgcttggaatcggaagaggatcagcaactgcgtggcagactacagcgtcctgtacaacctggccccattcttcacattcaagtgctacggcgtctcccccacgaagctgaatgacctgtgcttcaccaacgtgtacgcagacagcttcgtgatccggggagacgaggtccgccagatcgctccagggcagaccggcaacatcgccgactacaactacaagctccctgacgacttcaccgggtgtgtgatcgcttggaacagcaacaagctggacagcaaggtgtccggcaactacaactacctgtaccgcctgtttcgcaagtccaacctgaagcccttcgagcgggatatctccacagagatctaccaggctggcaacaagccctgcaacggcgtggcgggcttcaactgctacttcccactgaggtcttactccttcaggcccacatacggggtggggcaccagccctaccgcgtggtggtgctcagctttgagctcctccacgcccccgccaccgtgtgtgggcccaagaagagtaccaacctggtgaagaacaagtgcgtgaacttcaacttcaacgggctcaaggggaccggcgtcctcaccgagtccaacaagaagttcctgcccttccagcagtttggcagagacatcgccgacactacagacgcggtccgggatccccagaccctggagatcctggacatcacgccctgtagcttcggcggtgtctctgtcatcactcccggtaccaacacatccaaccaggtggcggtgctgtaccagggcgtgaattgcactgaggtgccagtggcaattcacgccgatcagctgacacccacctggcgggtgtacagtaccgggagcaacgtgttccagacacgggcaggatgtctgatcggcgctgagtacgtgaacaacagctacgagtgcgacatccccattggagcgggcatctgcgccagctaccagacccagactaagagccacaggcgggcccgctctgtggcctcacagagcatcatcgcctacactatgagtctgggggctgagaacagcgtggcctactccaacaacagcatcgcaatcccaaccaacttcacaatcagcgtcaccacggagatcctgcccgtgtctatgaccaagacctcagtggactgcacaatgtacatctgcggggacagcaccgagtgttccaacctcctgctccagtacggcagtttctgtacacagctcaaaagggccctgacaggtatagccgtggagcaggacaagaacactcaggaggtgttcgcgcaggtgaagcagatctacaagactcctcccatcaagtactttggagggtttaacttcagccagatcctgcctgaccccagcaaaccctccaagaggagcttcatcgaggatctgctctttaacaaagtcaccctcgccgacgcagggttcattaagcagtacggtgactgtctgggagatatcgccgctcgggatctcatctgtgcgcagaagttcaagggactgaccgtcctgccacccctgctcacggatgagatgatcgcccagtacaccagcgccctgctggctgggacgatcacttcaggttggactttcggggcaggcgccgccctgcagatccccttcgccatgcagatggcctacaggttcaacgggatcggcgtgacacagaatgtgctgtacgagaatcagaagctgatcgccaaccagttcaacagcgcgatcggcaagatccaggactcactctccagcaccgcaagcgccctggggaagctccaggacgtggtcaaccacaacgcacaggctctgaacaccctcgtcaagcagctgagcagcaagttcggcgccatctcttctgtgctgaatgacatcttcagccggctggatcccccagaggctgaggtccagatcgaccggctgatcactggtcggctgcagagtctgcagacctacgtgactcagcagctgatcagggcagccgagatccgggcctcagccaacctggccgccacgaagatgtcagagtgcgtgctgggccagtccaagagggtggacttctgtgggaagggctaccacctgatgtccttcccacagagcgcccctcacggagtggtgttcctgcacgtcacctacgtgccagcacaggagaagaacttcacaacagctcccgcaatctgccacgacgggaaggcccacttcccccgggagggggtcttcgtgtcaaacggcacccactggttcgtgacacagcgcaacttctacgagccacagatcatcaccactgacaacaccttcgtcagtgggaactgtgacgtggtgatcggcatcgtcaacaacaccgtgtacgacccccttcaacccgaactggatagcttcaaggaggagctggacaagtacttcaagaaccacacctccccagacgtggacctgggcgacattagcggcatcaacgctagtgtcgtcaacatccagaaggagatcgacaggctcaacgaggtggccaaaaacctcaacgagagcctgatcgatctccaggagctggggaagtacgagcagtacatcaagtggccttggtacatctggctcgggttcatcgcagggctgatcgccatcgtgatggtgacaatcatgctgtgctgcatgaccagctgctgcagctgcctgaagggctgctgcagctgcgggagctgttgcaagttcgacgaggacgactcagagcctgtgctcaagggggtgaagctgcactatacttgataa

SEQ ID NO: 125 - RNA, 3816 nt, synthetic construct
  source 1..3816: mol_type = other RNA
atgttcgtgttcctggtgctgcttccgctggtcagcagccagtgcgtgaacctgaccacgcggacgcagctgccacccgcgtacaccaatagcttcactcggggggtctactacccggacaaggtcttccggagcagcgtgctgcacagcacgcaggacctcttcctgccgttcttctcgaacgtcacgtggttccacgtgatcagcgggacgaacggcacgaagaggttcgacaaccccgtgctcccgttcaatgacggggtgtatttcgccagcatcgagaagagtaacatcattcgggggtggatcttcggcactaccttggactccaagacgcagagcctgctcatcgtgaacaacgccaccaacgtggtgatcaaggtctgcgagttccagttctgcaacgaccccttcttggaccacaagaacaacaagagctggatggagtccgagttcagagtctacagcagcgccaacaattgcaccttcgaatacgtgagccagccgttcctgatggacctggaaggcaagcagggcaacttcaagaacttgcgcgagtttgtcttcaagaacatcgacggctacttcaagatctacagcaagcacacccccatcattgtgcgggagccggaggacctgccgcagggcttcagcgctctggagccgctggtggacctgcccatcggcatcaacatcacgcggttccagacgctgttggccctgcacaggtcctacctgactccgggagactccagctccgggtggacggccggggctgcagcctactatgtgggctacctgcagccccggaccttcttgttgaagtacaacgagaacggcacgatcacggacgccgtggattgtgccttggaccccctgagcgagaccaagtgtaccctgaagtccttcaccgtggagaaggggatctaccagacctccaacttccgggtccagccgactgagagcatcgtgcggtttcccaacattaccaacttgtgccccttcgatgaggtgttcaacgccacgcggttcgccagcgtgtacgcctggaacaggaagcgcatcagcaactgcgtggccgactactcagtgttgtacaacctcgccccgttcttcaccttcaagtgctacggggtgagccctacaaagctgaacgacctctgcttcaccaacgtgtacgccgacagctttgtgattcgcggcgacgaggtccggcagatcgccccagggcagaccggcaatatcgctgactacaactacaagctgcctgacgatttcaccgggtgcgtgatcgcctggaacagcaacaagctggacagcaaggtgtcagggaactacaattacctgtaccggttgttcaggaagagtaacctgaagccgttcgagcgtgacatcagcaccgagatctaccaggccggcaacaagccctgcaacggggtggcgggattcaactgctactttccgttgcgctcctattcctttcggcccacctacggggtgggccaccagccctacagggtggtggtgctctccttcgagctgctccacgcaccggccacggtgtgtgggccgaagaagagtaccaacctggtgaagaataagtgcgtcaacttcaacttcaacgggctgaaaggaacaggagtgctgacggagagcaacaagaaattcctgccattccagcagttcgggcgcgacatcgctgacaccaccgacgctgtgcgggacccccagaccctggagatcctggacatcaccccttgcagcttcggcggcgtcagcgtgatcacgcccgggaccaacacatccaaccaggtggccgtgctgtaccagggcgtgaactgcaccgaggtgccggtggccatccacgccgatcagctgacgcccacctggcgggtgtactccacgggcagcaacgtcttccagacacgcgccggctgcttgatcggagccgagtacgtcaataacagctacgagtgcgacattcccatcggggccgggatctgcgccagctaccagacgcagaccaagtcccaccggcgcgctcggagcgtggcctcccagagcatcatcgcctacacgatgagcctgggggccgagaacagcgtcgcttatagcaacaacagcatcgctatccccaccaactttacaattagcgtgaccacggagatcttgcccgtcagcatgaccaagacctccgtggactgcaccatgtacatctgcggggatagcaccgagtgctccaacctgctcctgcagtacgggtccttctgcacgcagttgaagcgcgcattgaccggcatcgcagtggagcaggacaagaacacgcaggaggtgtttgctcaggtcaagcagatctacaagacgcccccgatcaagtacttcgggggcttcaacttcagccagatcctgcctgacccgagcaagccctccaagcgtagcttcatcgaggacctgctgttcaataaagtgacgctggcagacgccggcttcatcaagcagtacggcgactgtctgggggacatcgctgcccgggacctcatctgtgcccagaagttcaagggcctcacggtcctgccgcccctgctcacagatgagatgatcgcccagtacacgagcgccctgctcgctgggaccatcaccagcgggtggacgttcggcgcgggcgctgcattacagatccccttcgcgatgcagatggcctacagatttaacggtatcggcgtcacgcagaacgtgctgtacgagaaccagaagctgatcgccaaccagttcaacagcgccatcgggaagatccaggacagcttgagcagcaccgcctctgccctggggaagctgcaggacgtcgtgaatcacaatgcccaggccttgaacacgttggtgaagcagctctcatcgaagttcggcgccatcagcagcgtgctgaacgacatcttcagtcggctggaccccccggaggcggaggtccagatcgaccgcctgatcacggggaggctgcagagcttgcagacgtacgtgactcagcagctcatcagggctgctgagatccgggcgtctgccaacctggctgccaccaagatgtccgaatgcgtcttggggcagtccaagcgggtggacttctgcgggaagggctaccacctgatgtccttcccgcagagcgcaccccacggggtggtgttcctgcacgtcacctacgtgccggctcaggagaagaacttcaccacagctcccgcaatctgccacgacgggaaggcccacttcccccgggaaggggtcttcgtgtcgaacggcacccactggttcgtcacgcagcgcaacttctacgagccacagatcatcaccactgacaacaccttcgtcagtgggaactgcgacgtggtcatcgggatcgtcaacaacacggtgtacgatcccctgcagcccgagctggatagcttcaaggaggagctggacaagtacttcaagaaccacacttccccggatgtggacctcggggacatcagcggaatcaacgcctccgtggtcaacatccagaaggagatcgacaggctcaacgaggtggcaaagaacctcaacgagagcctgatcgatctccaggagctggggaagtatgagcagtacatcaagtggccctggtacatctggctcgggttcatcgcagggttgatcgccatcgtgatggtgacgatcatgttgtgctgcatgacgagctgctgcagctgcctgaagggctgctgcagctgcgggagctgctgtaagttcgacgaggacgattccgagccggtgctgaagggcgtgaagctgcactacacctgataa

SEQ ID NO: 126 - RNA, 3816 nt, synthetic construct
  source 1..3816: mol_type = other RNA
atgttcgtgttcctggtgctgctgccgctggtcagttcgcagtgcgtgaacctgaccacgcggacgcagctgccacccgcgtacactaacagtttcactcggggggtctactacccggataaggtcttccggagtagcgtgctgcacagcacgcaggacctcttcctcccgttcttctcgaatgtcacgtggttccacgtgatcagcgggacgaacgggacgaagaggttcgacaaccccgtgctcccgttcaatgatggggtgtacttcgccagcatcgagaagagtaacatcattcgagggtggatctttggcactaccctggactccaagactcagagtctgctcatagtcaacaatgccaccaacgtggtgatcaaggtctgtgagttccagttctgcaacgatccattcctggatcacaagaataacaagagctggatggagtctgagttcagagtctatagtagtgccaacaactgcaccttcgagtatgtgagccagccgttcctgatggaccttgaaggcaagcagggcaacttcaagaacctgcgcgagtttgtcttcaagaacatcgacggctacttcaagatatacagcaagcacacccccatcattgtgcgggagccggaggacctgccgcagggcttcagcgctctggagccgctggtggatttgccgatcggcatcaacatcacgcggttccagacgctgttggccctgcacaggtcctacctgactccgggggactccagctccgggtggacggccggggctgcagcctactacgtgggctacttgcagccccggaccttcttgttgaagtacaacgagaacggcacaatcacggacgccgtggattgtgccctggaccccctgagtgagaccaagtgtaccctgaagtccttcaccgtggagaaggggatctatcagacctccaacttccgggtccagccgactgagagcatcgtgcggttccccaacatcacgaacttgtgcccctttgatgaggtgttcaacgccacgcggttcgcgagcgtgtacgcctggaacaggaagcgcatcagcaactgcgtggcagattattcagtgttgtacaacctcgccccgttcttcaccttcaagtgctacggggtgagccccacaaaactgaatgatctctgcttcaccaacgtgtacgccgatagctttgtgattcgcggcgacgaagtccggcagatcgccccagggcagaccggcaacatcgccgactacaactacaagctgcctgacgattttaccggttgcgtgattgcctggaacagcaacaagctggactcgaaggtgtcagggaactacaactacctgtaccggttgttcagaaagagcaacctgaagccgttcgagcgtgacatcagcaccgagatctaccaggccggcaacaagccctgcaacggagtggcaggcttcaactgttactttccgttgcgctcctactcctttcggcccacctacggggtgggccaccagccctatagggtggtggtgctctccttcgagctgctccacgcgccggccacggtgtgtgggccgaagaagagtaccaacctggtgaagaacaagtgcgtcaacttcaacttcaacgggctgaagggaacaggggtgctgacggagagtaacaagaagttcctgccattccagcagttcgggcgtgacatcgctgacaccaccgacgctgtgcgggatccccagaccctcgagatcctggacatcaccccgtgcagcttcggtggtgtcagcgtgatcacgcccgggaccaacacctccaaccaggtggccgtgctgtaccagggcgtgaattgcaccgaggtgccggtggcaattcacgccgaccagctgacgcccacctggcgggtgtactccacgggcagcaacgtcttccagacccgcgccggctgcttgatcggggccgagtacgtgaacaacagctacgagtgcgatatcccgatcggggccgggatctgcgcctcctaccagacgcagaccaagtcccatcggcgcgctcgtagcgtggcctcccagagcatcatcgcctacacgatgagcctgggggccgagaactccgtcgcgtacagcaacaactccatcgctatccccacaaattttacaattagcgtgaccacggagatcttgcccgtcagcatgaccaagacctccgtggactgcaccatgtacatttgtggggatagcaccgagtgttccaacctgctcctgcagtacgggtccttctgcacgcagctgaagcgtgccctgaccggtattgcagtggagcaggacaagaacactcaggaggtgtttgctcaggtcaagcagatctacaagacgcccccgattaaatacttcgggggcttcaactttagccagatcctgcccgacccgagcaagccctccaagcggagcttcattgaggacctgctctttaacaaggtgacgctggcagacgccggcttcatcaagcagtacggcgactgtctgggggacatcgctgcccgggacctcatctgtgcccagaagttcaagggcctcacggtcctgccgcctctgctcacagatgagatgatcgcccagtacacgagcgctctgctcgctgggaccatcaccagcgggtggacgttcggtgctggggcggcattacagatcccctttgccatgcagatggcctacagattcaacgggattggtgtcacgcagaacgtgctgtacgagaaccagaagctgattgccaaccagttcaacagcgcaatcggtaagatccaggacagcttgagcagcaccgcctctgccctggggaagctgcaggacgtcgtgaatcacaacgcccaggccctgaacacgttggtgaagcagctctcatcaaagttcggcgcaatcagcagcgtgctgaacgacatcttcagtcggctggaccccccggaggctgaggtccagatagatcgcctcatcacgggaaggcttcagagtttgcagacgtacgtgactcagcagctcatccgggctgctgagatccgtgcgtctgcaaacctggctgccaccaagatgagcgagtgcgtcttggggcagtcaaagcgggtggacttctgcgggaagggctaccacctgatgtccttcccgcagagcgcaccccacggggtggtgttccttcacgtcacctacgtgccggctcaggagaagaacttcacaacagctcccgccatctgccacgacgggaaggcccacttcccccgggaaggggtcttcgtgtcgaatggcacccactggttcgtcacgcagcgcaacttctatgagccacagatcatcaccactgacaacaccttcgtcagtgggaactgcgatgtggtcatagggatcgtcaacaacacggtgtacgatcccctgcagcccgagctggatagcttcaaggaggagctggacaagtacttcaagaatcatacttccccggatgttgacctcggggacatcagcggcatcaacgcctccgtggtcaacatccagaaggagatcgacaggctcaacgaggtggcaaaaaacctcaacgagagcctgatcgatctccaggagctggggaagtatgagcagtacatcaagtggccttggtacatctggctcgggttcatcgcagggctgatcgccatcgtgatggtgacgatcatgttgtgctgcatgacgagctgctgcagctgcctgaagggctgctgcagctgcgggagctgttgcaagttcgacgaggacgactccgagccggtgctgaagggcgtgaagctgcactacacctgataa

SEQ ID NO: 127 - RNA, 3816 nt, synthetic construct
  source 1..3816: mol_type = other RNA
atgttcgtgttcctggtgttgttgccgctggtgtcgagccagtgcgtcaacctgacgacacggacacagctgccccccgcgtacacgaactcgttcacgcggggggtgtactacccagacaaggtcttcaggagcagcgtgctgcacagcacgcaggacctcttcctcccgttcttctccaatgtcacgtggttccacgtgatatcggggacgaacgggacgaagaggttcgacaaccccgtgctcccgttcaatgacggggtgtacttcgcgtcgatcgagaagagtaacatcattcgagggtggatttttggcactaccctggactcgaagactcagagcctgctcatagtcaacaacgccaccaacgtggtgatcaaggtctgtgagttccagttctgcaacgacccgttcttggaccacaagaacaacaagagctggatggagtctgagtttcgagtctacagtagtgccaacaattgcaccttcgaatatgtgagccagccgttcctgatggacctggagggcaagcagggcaacttcaagaacttgcgcgagtttgtcttcaagaacatcgacggctacttcaagatctactcgaagcacaccccgatcattgtgcgggagccggaggacctgccgcagggcttcagcgctctggaaccgctggtggacttgcccatcggcatcaacatcacgcggttccagacgctgctggccctgcacaggtcctacctgactccgggagactcttcgtcggggtggaccgcgggtgcagccgcctactacgtgggctacctgcagccgcggacgttcttgttgaagtacaacgagaacggcacaatcaccgacgcggtggattgtgccctcgacccgctgagcgagaccaagtgcacactcaagagcttcacggtggagaaggggatctatcagacctccaacttccgggtccagccgactgagagcatcgttcggttcccgaacatcaccaacctgtgcccgtttgacgaggtgttcaacgccacgcggttcgcgtccgtgtacgcctggaaccggaaacggatctcgaactgcgtggcggactactcagtgttgtacaacctcgccccgttcttcaccttcaagtgctacggggtgagccccacaaagctgaacgacctctgcttcaccaacgtctacgcggatagcttcgtgatccgcggcgacgaggtgaggcagatcgcacctggtcagacgggcaacatcgccgactataattacaagctgcctgatgatttcacgggatgtgtcatcgcttggaacagcaacaagttggactccaaggtgagcgggaactataactacctgtaccgcttatttcggaagtccaacttgaagccgttcgagcgagacatatccacggagatctatcaggcaggcaataagccctgcaacggggtggcagggttcaattgttactttcccctgaggtcgtactctttccggcccacatacggggtggggcaccagccttacagggtggtggtgctatccttcgagttgctgcacgccccagccaccgtatgtgggccgaagaagagtacgaacctcgtgaagaacaagtgcgtcaacttcaacttcaacgggttgaaggggacgggcgtgctcacggagagtaacaagaaattcctgccattccagcagttcgggcgtgatatcgctgacaccaccgacgcggtgcgggatccccagaccctggagatcctggacatcacgccgtgcagcttcggtggtgtcagcgtgatcacgcccggcaccaacacctcgaaccaggtggcagtgctttaccagggtgtgaactgcactgaggtgcctgtggctatccacgccgatcagctgaccccaacgtggagggtgtactcgacagggagcaacgtcttccagacccgcgctggctgcctgattggcgctgagtacgtgaacaactcgtacgagtgcgacatccccattggggccggcatctgcgcgagttaccagacccagaccaagagccatcggagggcgagatcggtggcatcccagtcgatcatcgcctacacgatgagcctgggggccgagaacagcgtggcctacagcaacaacagcatcgctatccccacaaactttacaatcagtgtgaccaccgagatcttgcccgtcagcatgaccaagacctcggtggactgcactatgtacatctgtggggatagcaccgagtgttccaacctgctcctccagtacggctcgttctgcacgcaactgaagcgtgcattgacgggcatcgcggtggagcaggacaagaacactcaggaggtgtttgctcaggtcaagcagatctacaagacgcccccgatcaagtacttcgggggcttcaacttctcccagatcctgccggacccgagcaagccctccaagaggtccttcatcgaggacctcttgttcaacaaggtgactctcgcggatgccggcttcatcaaacagtatggggactgcctgggtgacatcgccgccagggacctgatctgcgcgcagaagttcaaggggctgacagtgctgcccccgctcctgacggacgagatgatcgctcagtacacgtccgcgctgttggcggggacgattacgagcggctggacgttcggagcgggggcagcactgcagatccctttcgcgatgcagatggcctacaggttcaatggcatcggtgtcacccagaacgtactctacgagaatcagaagctcatcgccaatcagttcaacagcgcgatcgggaagatccaggactccctgtcgagtacagcctccgcgttggggaagctgcaggacgtggttaaccacaacgcccaggccctgaacaccctggtgaagcagctgtcatccaagttcggggccatcagttcggtgctgaacgacatcttcagtcggctggaccccccggaggcggaggtccagatagatcgcctcatcaccgggcgcctccagagtttgcagacgtacgtgactcagcagctcatacgggctgctgagatacgtgcgtctgcaaacctggcggcgaccaagatgagcgagtgtgtacttggtcagagcaagcgggtcgacttctgcgggaagggctatcacctgatgtccttcccgcagagcgccccccacggggtggtcttcctgcacgtgacgtatgtgccggcgcaggagaagaacttcaccactgcgccggccatatgtcacgacgggaaggcccacttcccccgggagggcgtgttcgtgtcgaatgggacgcactggttcgtcacccagcggaacttctatgaaccacagataatcaccactgacaacaccttcgtcagtgggaactgcgatgtggtcataggaatcgtcaacaacacggtgtacgacccccttcagcccgagctggactcgttcaaggaggagctggacaaatacttcaagaaccacacgagcccggatgttgacctcggggacattagcggaatcaatgcctccgtggtcaacatccaaaaggagatcgacaggctcaacgaggtggccaagaacctcaacgagagcctgatcgatctccaggagctcggcaagtacgagcagtacatcaagtggccgtggtacatatggctggggttcatcgcagggctgatcgcgatcgtgatggtcacgatcatgctctgctgcatgacctcgtgctgctcgtgcttgaagggctgctgctcgtgtggttcttgctgcaagttcgacgaggacgattccgagccggtgctgaagggggtcaaactgcactacacctgataa

SEQ ID NO: 128 - RNA, 3810 nt, synthetic construct
  source 1..3810: mol_type = other RNA
atgttcgtgtttctggtgctgctgcccctggtgagcagccagtgcgtgaacctgatcaccaggacccagagttacaccaacagcttcacccggggcgtgtactaccccgacaaggtgttcaggagcagcgtgctgcacagcacccaggacctgttcctgcccttcttcagcaacgtgacctggttccacgccatcagcggcaccaacggcaccaagcggttcgacaaccccgtgttgcccttcaacgacggcgtgtacttcgccagcaccgagaagagtaacatcatccggggctggatcttcggcaccaccctggactccaagacccagagcctgctgatcgtgaacaacgccaccaacgtggtgatcaaggtgtgcgagtttcagttctgcaacgaccccttcctggacgtgtactaccacaagaacaacaagagctggatggagagcgagttcagggtgtacagcagcgccaacaactgcaccttcgagtacgtgagccagcccttcctgatggacctggagggcaaacagggcaacttcaagaacctgcgggagttcgtgttcaagaatatcgacggctacttcaagatctacagcaagcacacccccatcaacctgggcagggacctgccccagggcttcagcgccctggagcccctggtggacctgcccatcggcatcaacatcacccggttccagaccctgctggccctgcaccggagctacctgacccccggcgacagcagcagcggctggaccgccggcgccgccgcctactacgtgggctacctgcagcccaggaccttcctgctgaagtacaacgagaacggcaccatcaccgacgccgtggactgtgccctggaccccctgagcgagaccaagtgcaccctgaagagtttcaccgtggagaagggcatctaccagaccagcaacttcagggtgcagcccaccgagagcatcgtgaggttccccaacatcaccaacctgtgccccttcgacgaggtgttcaacgccacccggttcgccagcgtgtacgcctggaaccggaagcggatcagcaactgcgtggccgactacagcgtgctgtacaacttcgcccccttcttcgccttcaagtgctacggcgtgagccccaccaaactgaacgacctatgcttcaccaacgtgtacgccgacagcttcgtgatcaggggtaacgaggtgagccagatcgcccccggccagaccggcaacatcgccgactacaactacaagctgcccgacgacttcaccggctgcgtgatcgcctggaacagcaacaagctggacagcaaggtgggcggcaactacaactaccggtacaggctgttccggaagagtaacctgaagcccttcgagagggacatcagcaccgagatctaccaagccggcaacaagccctgcaacggcgtggccggcgtgaactgctacttccccctgcagagctacggcttccggcccacctacggcgtgggccaccagccctaccgggtggtggtgctgagcttcgagctgctgcacgcccccgccaccgtgtgcggccccaagaagagtaccaacctggtgaagaataagtgcgtgaacttcaacttcaacggcctgaccggcaccggcgtgctgaccgagagcaacaagaagttcctgcccttccagcagttcggcagggacatcgccgacaccaccgacgccgtgcgggacccccagaccctggagatcctggacatcaccccctgcagcttcggcggcgtgagcgtgatcacccccggcaccaacaccagcaaccaggtggccgtgctgtaccagggcgtgaactgcaccgaggtgcccgtggccatccacgccgaccagctgacccccacctggcgggtgtacagcaccggcagcaacgtgttccagacccgagccggctgcctgatcggcgccgagtacgtgaacagcagctacgagtgcgacatccccatcggcgccggcatctgcgccagctaccagacacagaccaagagccacaggcgggcccggagcgtggccagccagagcatcatcgcctacaccatgagcctgggcgccgagaacagcgtcgcctacagcaacaacagcatcgccatcccgaccaacttcaccatcagcgtgaccaccgagatcctgcccgtgagcatgaccaagaccagcgtggactgcaccatgtacatctgcggcgacagcaccgagtgcagcaacctgctgctgcagtacggcagcttctgcacccagctgaagcgagccctgaccggcatcgccgtggagcaggacaagaacacccaggaggtgttcgcccaggtgaagcagatctacaagaccccccccataaagtacttcggcggcttcaacttcagccagatcctgcctgaccccagcaagcccagcaagcggagcttcatcgaggacctgctgttcaacaaggtgaccctggccgacgccggcttcatcaagcagtacggcgactgcctgggcgacatcgccgcccgggacctgatatgcgcccagaagttcaacggcctgaccgtgctgccccccctgctgaccgacgagatgatcgcccagtacaccagcgccctgctggccggcaccatcaccagcggctggacgttcggcgccggcgccgccctgcagatccccttcgccatgcagatggcctaccgcttcaacggcatcggcgtgacccagaacgtgctgtacgagaaccagaagctgatcgccaaccagttcaacagcgccatcggcaagatccaggacagcctgagcagcaccgccagcgccctgggcaagctgcaggacgtggtgaaccacaacgcccaggccctgaacaccctggtgaagcagctgagcagcaagttcggcgccatcagcagcgtgctgaacgacatcctgagccggctggacccccccgaggcggaggtgcagatcgacagactgatcaccggccggctgcagagcctgcagacctacgtgacccagcagctgatccgggccgccgagatccgggccagcgccaacctggccgccaccaagatgagcgagtgcgtgctgggccagtccaagcgggtggacttctgcggcaagggctaccacctgatgagcttcccccagagcgccccccacggcgtggtgttcctgcacgtgacctacgtgcccgcccaggagaagaacttcaccaccgcccccgccatctgccacgacggcaaggcccacttcccccgggagggcgtgttcgtgagcaacggcacccactggttcgtgacccagcggaacttctatgagccccagatcatcaccaccgacaacaccttcgtgagcggcaattgcgacgtggtgatcggcatcgtgaacaacaccgtgtacgaccccctgcagcccgagctggacagcttcaaggaggagctggacaagtacttcaagaaccacaccagccccgacgtggacctgggcgacatcagcggcatcaatgccagcgtggtgaacatccagaaggagatcgacaggctgaacgaggtggccaagaacctgaacgagagcctgatcgacctgcaggagctgggcaagtacgagcagtacatcaagtggccctggtacatctggctgggcttcatcgccggcctgatcgcaatcgtgatggtgaccatcatgctgtgctgcatgaccagctgctgcagctgcctgaagggctgctgcagctgcggcagctgctgcaagttcgacgaggacgacagcgagcccgtgctgaagggcgtgaagctgcactacacctgataa

SEQ ID NO: 129 - RNA, 3810 nt, synthetic construct
  source 1..3810: mol_type = other RNA
atgtttgtgttcctggtgctgctgccactggtgagctctcagtgcgtgaatctgatcacacgcacccagagctacaccaacagcttcacccgcggggtgtactaccccgacaaggtgttcaggtcctccgtgctgcacagcacacaggacctgttcctgcccttcttcagcaacgtgacctggtttcacgccatcagcgggactaacggaaccaagaggttcgacaatcccgtgctgccatttaatgacggcgtgtacttcgccagcaccgagaagagtaacattatcaggggctggatctttggcaccacactggatagcaagacacagtccctgctgattgtgaacaacgctaccaacgtggtgatcaaagtgtgcgagtttcagttctgcaacgatccctttctggatgtgtactaccacaagaacaacaagtcctggatggagtccgagttccgggtctacagcagcgccaacaattgcaccttcgagtacgtgtcccagcccttcctgatggacctggagggcaagcaggggaacttcaagaacctgagggagttcgtgttcaagaacatcgacggatatttcaagatctactcgaagcacactcccatcaacctggggcgggacctgccccagggcttcagcgccctggaacccctggtcgatctgcccattggaattaatatcacacgctttcagaccctgctggctctgcaccggagctacctgacgccaggggacagctctagtggctggaccgccggggctgcggcctactacgtgggctacctgcagccccggacattcctgctgaagtacaacgagaacggcacgatcacagacgctgtggattgtgccctcgatcctctgtccgagaccaagtgtacactgaagagtttcaccgtggagaaggggatctaccagacctccaacttcagggtgcagccgaccgagagcattgtgcgcttcccaaacatcacaaacctgtgcccattcgacgaagtgttcaatgccactcggttcgcttcggtgtacgcttggaatcggaagaggatcagcaactgcgtggccgactactctgtgctgtacaacttcgccccattcttcgccttcaagtgctatggggtgtcccccacaaagctgaacgacctgtgcttcaccaacgtgtacgcggacagctttgtgatccgggggaacgaggtgtctcagattgctcccggccagacaggcaacatcgccgactacaattacaagctgcccgacgacttcacaggctgtgtgatcgcttggaactccaacaaactggactccaaggtgggcggcaactacaactacaggtaccgcctgttccggaagagtaatctgaagcccttcgagagggacatcagcacagagatctaccaggccggcaacaagccctgcaacggggtggccggggtgaactgctatttcccgctgcagagctacggatttcggcccacctacggggtggggcaccagccctaccgcgtggtggtgctgagcttcgagctgctgcacgccccggccaccgtgtgcgggcctaagaagagtaccaacctggtgaagaacaagtgtgtgaactttaatttcaatgggctgaccgggaccggggtgctgacagagagcaacaagaagttcctgcccttccagcagttcggccgggacatcgccgacaccaccgatgccgtccgggatccccagaccctggagatcctggacatcaccccctgcagctttgggggggtgtctgtgatcacacctgggacgaacacctccaaccaggtggcggtgctgtaccagggcgtgaattgcacggaggtgcccgtggcgattcacgccgaccagctgacccccacctggcgggtgtactccaccggctccaacgtgttccagaccagggccggctgtctgatcggagctgagtacgtgaattccagctacgagtgcgacatccccatcggagctggaatttgcgccagctaccagactcagaccaagagccaccggagggcccggagcgtggcctcccagagcatcatcgcctacacaatgagcctgggggccgagaactccgtggcctactccaacaacagcatcgctatccccacaaatttcaccatcagcgtgaccacagagatcctgccggtctccatgaccaagacctctgtggactgcacgatgtacatttgtggggatagcaccgagtgcagcaacctgctgctgcagtacggcagcttctgcactcagctgaagcgggccctgactggaatcgcggtggagcaggacaagaacacccaggaggtgtttgcccaggtgaagcagatctacaagacaccccccattaagtatttcggggggtttaacttcagccagatcctgccagacccatccaaaccgagcaagaggtccttcatcgaggacctcctgttcaacaaggtgaccctggcggacgctggcttcatcaagcagtacggcgactgcctgggcgacatcgctgcgagggacctgatctgcgctcagaagttcaatgggctgaccgtgctgccccccctgctcacggacgagatgatcgcccagtacacatccgctctcctggccggcaccattaccagcggatggaccttcggggctggagccgccctgcagatccctttcgccatgcagatggcctacaggttcaacgggatcggggtgactcagaatgtcctgtacgagaaccagaagctgatcgccaaccagttcaacagcgccatcgggaagattcaggacagcctgagctccacagcttccgccctggggaagctgcaggacgtggtgaaccacaacgctcaggccctgaacaccctggtgaagcagctgtcgagcaagttcggcgccatcagctcggtgctcaacgacattctgagtcgcctcgatccccctgaggccgaagtgcagatcgacaggctgatcacagggcggctccagtccctgcagacctacgtgactcagcagctcatcagggctgctgagatcagggcctccgccaacctggccgccaccaagatgagcgagtgtgtgctgggccagtccaaacgggtggacttctgtgggaagggctatcacctgatgtccttcccacagagcgccccccatggggtggtgttcctgcacgtgacatatgtgccagcgcaggagaagaacttcaccacagcgccggccatatgtcacgacggcaaggcgcacttccccagggagggcgtgttcgtgagcaacgggacccactggttcgtgacccagcggaacttctacgagccgcagatcatcaccaccgacaacaccttcgtgagcgggaactgcgacgtggtgatcggcatcgtgaacaacaccgtgtacgaccccctgcagcccgagctggactccttcaaggaggagctggacaagtacttcaagaaccacacgagccctgacgtggacctgggggacatctccgggatcaacgcctcggtggtgaacatccagaaagagatcgaccgcctgaacgaggtggccaagaacctgaacgagtccctgatcgacctgcaggagctggggaagtacgagcagtacattaaatggccctggtacatctggctggggttcatcgccggcctgatcgccatcgtgatggtgaccatcatgctgtgctgcatgaccagctgctgcagctgcctgaagggctgctgcagctgcgggtcgtgctgcaagttcgacgaggatgactccgagcccgtgctgaagggggtgaagctgcactacacctgataa

SEQ ID NO: 130 - RNA, 3810 nt, synthetic construct
  source 1..3810: mol_type = other RNA
atgtttgtgttcctggtgctgctccccctggtcagctcacagtgcgtcaacctcatcaccaggactcagagctacaccaacagtttcactcggggggtctactaccccgacaaggtgttcaggagcagcgtcctgcacagcacgcaggacctgttcctgccgttcttcagcaacgtgacctggtttcacgccatcagtgggaccaacgggacgaagaggttcgataatcccgtgctcccattcaacgatggcgtgtacttcgccagcacggagaagagtaacatcatcaggggctggatctttgggaccacactggactcaaagacccagtccctgctgatcgtgaataacgccaccaatgtggtgattaaggtgtgcgagttccagttctgtaatgacccctttctcgacgtgtactaccacaagaacaacaagtcctggatggagagcgagttccgggtgtacagcagcgccaacaactgtacattcgagtatgtctcccagcccttcctgatggacctcgaggggaagcagggcaactttaagaacctgagggagttcgtgttcaagaacatcgacgggtacttcaagatctactcgaagcacacccccatcaatctgggacgcgacctccctcagggcttcagcgccctggagcccctcgtggacctgcccattggaatcaacatcaccaggttccagacgctcctggccctgcacaggagctacctgacacctggtgacagctccagtgggtggactgcaggtgccgccgcctactacgtggggtacctgcagcccaggacgttcctgctgaagtacaacgagaatgggaccattacagacgctgtggactgcgcactggaccccttaagcgagaccaagtgtactctgaagtccttcaccgtcgagaagggcatctatcagaccagcaatttcagagtccagccaactgagagcatcgtgaggttccccaacatcacaaacctgtgtccctttgacgaggtgttcaacgccacccggttcgcctccgtgtacgcctggaatcgcaagagaatcagcaactgtgtcgcagattattcagtgctgtacaacttcgccccattcttcgccttcaagtgctatggggtgagccccacaaagctgaatgatctgtgcttcacaaacgtgtatgctgattcttttgtgattcgaggcaacgaggtgagccagattgccccagggcagaccgggaacatcgcggactataattataagctccccgacgactttaccggctgcgtgattgcctggaacagcaataagctcgacagcaaggtcggggggaattataattataggtaccgcctgttccgaaagtccaacctgaagcccttcgagcgggatatctccacggagatctaccaggctggcaacaagccctgcaacggcgtggcaggggtgaactgctacttccccctgcagagctacgggttcaggcccacctacggggtggggcaccagccctaccgcgtggtggtcctgagcttcgagctcctgcacgcccccgcaacagtgtgcggtccaaagaagtccaccaacctggtgaagaataagtgcgtgaacttcaacttcaacggactcaccgggaccggcgtcctgaccgagtccaacaagaagttcctgcccttccagcagttcggcagagacatcgccgacactacggacgcggtccgggatccccagaccctggagatcctggacatcacgccctgtagtttcggcggtgtctctgtcattactcccgggaccaatacatccaaccaggtggcggtgctgtaccagggcgtgaattgcacggaggtgcccgtggcaattcacgccgaccagctgacccccacctggcgggtgtacagcaccgggagtaacgtgtttcagacacgggcaggatgtctgattggcgctgagtatgtgaacagcagctacgagtgcgacattcccatcggcgcggggatctgcgctagctatcagacccagaccaagagccacaggagggctcgctctgtggcctcacagagcatcatcgcctacacgatgagtctgggcgctgaaaacagcgtggcctactccaacaacagcatcgccatccctaccaacttcaccatctcagtgaccacagagatcctgcccgtgtccatgacaaagacttccgtggactgcaccatgtacatctgcggggacagcaccgagtgttccaacctcctgctccagtacggcagtttctgtacacagctcaagcgggccctgacaggaattgccgtggagcaggacaagaacactcaggaggtgtttgcccaggtcaagcagatctacaagacaccccccatcaagtacttcggggggttcaacttctcccagatcctgcccgaccccagcaagccctccaagaggagctttattgaagacctgctctttaataaggtgactctcgccgacgcagggttcatcaagcagtacggggactgcctgggggatatcgccgctcgagatctcatctgtgcccagaagttcaacgggctgaccgtcctgccccccctgctcacagatgagatgatcgcccagtacaccagcgccctgctggctgggaccatcacttcaggttggacgttcggagctggcgccgccctgcagatcccattcgccatgcagatggcctacaggttcaacgggatcggggtgactcagaatgtcctgtacgagaaccagaagctgattgccaaccagtttaactcagccatcgggaagattcaggacagcctgagcagcaccgcatccgccctggggaagctccaggatgtggtgaaccacaacgctcaggccctgaacaccctggtgaagcagctgagctccaagttcggggcaatcagctcggtcctcaacgacattctgagtcgcctcgatccccccgaggctgaggtccagatcgaccggctgatcactggtcggctgcagagtctgcagacctacgtgactcagcagctgatcagggcagccgagatccgggcctcagccaacctggcagccaccaagatgtccgagtgtgtcctggggcagtctaagcgggtggacttctgtgggaagggctaccacctgatgtccttcccacagagcgcaccccacggggtggtgttcctccacgtgacctacgtgcccgcacaggagaagaacttcaccaccgccccggccatctgccacgatggcaaggcccacttcccccgggaaggggtcttcgtgtcaaacgggacacactggtttgtgacccagcggaacttctacgagcctcagatcatcaccactgacaacaccttcgtcagtgggaactgcgacgtggtcatcggtattgtgaacaataccgtgtacgacccactgcagcccgagctcgactccttcaaggaggagctcgacaagtacttcaaaaaccatacttccccagacgtggacctgggcgacatcagcggcatcaacgccagcgtcgtcaatatccagaaggagatcgacaggctcaatgaggtggccaagaacctcaatgagagcctgatcgatctccaggaactggggaagtatgagcagtacatcaagtggccttggtacatctggctgggcttcatcgctggtctgattgccatcgtgatggtgaccattatgctgtgctgcatgaccagctgctgcagctgcctgaagggctgctgcagctgcgggtcatgctgcaagttcgatgaggacgacagcgagcctgtcctgaagggggtcaagctgcactacacctgataa

SEQ ID NO: 131 - RNA, 3810 nt, synthetic construct
  source 1..3810: mol_type = other RNA
atgtttgtgttcctggtgctgctgccgctggtcagctcacagtgcgtgaacctgatcacgcgcacccagagctacaccaatagcttcacccggggggtgtactaccccgacaaggtgtttcgcagcagcgtgctgcactccacccaggacctgttcctgccgttcttctccaacgtgacctggttccacgccatcagcgggaccaacgggaccaagcggttcgacaaccccgtgctcccgtttaatgatggcgtgtacttcgccagcacggagaagagtaacatcatccggggatggatcttcggcaccacactggactcaaagacccagtcactgctgatcgtgaacaacgccacgaacgtggtgatcaaggtctgtgagttccagttctgcaacgatccgttcctggacgtgtactatcacaagaacaacaagtcctggatggagtccgagttccgggtgtactccagcgccaacaactgtacgttcgagtacgtgtcccagcccttcctgatggacctcgaggggaagcagggcaactttaaaaacctgcgggagttcgtgttcaagaacatcgacgggtactttaagatctacagcaaacacaccccgatcaacctggggcgcgacctcccgcaggggtttagcgccctggagcccctcgtggacttgcccatcgggatcaacatcacccggttccagacgctcctggccctgcacaggagctacctgacgccgggcgactccagctccggctggaccgccggggctgcagcctactacgtgggctacctgcagccccggacgttcttgttgaaatacaacgagaacggcacaatcacggacgccgtggactgtgccctcgacccgcttagcgagaccaagtgcacactcaaaagcttcaccgtggagaaggggatctatcagacctcaaacttccgggtccagccgactgagagcatcgtgcggttccccaacattaccaacttgtgccccttcgatgaggttttcaacgccacgcggtttgccagtgtgtatgcctggaacaggaagcgcatcagcaactgcgtggcagactactcagtgctgtacaacttcgccccgttcttcgccttcaagtgctacggggtgagccccaccaagctgaacgacctctgcttcaccaacgtgtacgccgacagcttcgtgattcgcggcaacgaggtgtcccagatcgcccccgggcagaccgggaacatcgccgactacaactacaagctgccggacgacttcaccgggtgcgtgatcgcctggaacagcaataagctggactccaaggtgggcgggaactacaactaccgctaccggttgttccggaagagtaacctgaagccgttcgagcgcgacatcagcaccgagatctaccaggccggcaacaagccctgcaacggggtggcaggggtgaactgttactttccgctgcagagctacgggttcaggcccacctacggggtggggcaccagccctaccgcgtggtggtcctgagcttcgagctgctgcacgcccccgccaccgtctgtgggcccaagaagtccacgaacttggtgaagaacaagtgcgtgaacttcaactttaacgggctcacaggcacgggggtgttgacggagagtaacaagaagttcctgccattccagcagttcggcagggacatcgccgacaccacggacgccgtccgggatccccagaccctggagatcctggacatcaccccgtgcagcttcggcggcgtctctgtcatcacccccggcaccaacacgtccaaccaggtggccgtcctgtaccagggggtgaactgtactgaggtgccggtggcgatacacgcagaccagttgacccccacctggcgcgtgtacagcacgggcagcaacgtcttccagacacgcgccggctgcttgatcggcgccgagtacgtgaactcaagctacgagtgcgatatccccatcggcgcagggatctgcgcctcctaccagacccaaaccaagtcccacaggagggccagatccgtggccagccagagcatcatcgcctacacgatgagcctcggcgccgagaattccgtggcttacagcaacaactccatcgccatccccaccaacttcacaatcagcgtgaccacggagatcttgcccgtcagcatgaccaagacctccgtggattgcaccatgtatatctgtggggacagcaccgagtgttccaacctgctcctgcagtacgggtccttctgcacccagctgaagcgggccttgaccggcatcgcagtggagcaggacaagaacactcaggaggtgtttgcccaggtcaagcagatctacaagacccccccgatcaagtacttcggggggttcaacttcagccagatcctgcccgaccccagcaaaccctccaagcggagcttcatcgaagacctgctctttaacaaagtgacgctggccgacgccggcttcatcaagcagtacggcgactgtctgggagacatcgctgcccgggacctgatatgcgcccagaagttcaacgggctgacggtgttgccacccctgctcaccgacgagatgatcgcccagtacacctccgccctcctggccgggacgatcacctctggctggacgttcggcgccggggccgcattacagatccccttcgccatgcagatggcctatagatttaacgggattggcgtcacgcagaacgtgctgtacgagaaccagaagctgatcgctaaccagttcaatagcgccatcgggaagatccaggacagcttgagcagcacggcgagcgctctgggcaagctccaggacgtcgtgaatcacaatgctcaggccctgaacacgttggtgaagcagctctcatcaaagttcggcgccatcagcagtgtgctgaacgatatcctcagtcggctggaccccccggaggccgaggtccagatagatcgcctgatcacggggcggctgcagagcttgcagacgtacgtgactcagcagctcatccgggctgctgagatccgggcgtctgccaacttggcagccaccaagatgagcgagtgtgtgctgggccagagcaagcgggtcgacttctgcgggaagggctaccacctgatgtccttcccgcagagcgcccctcacggggtggtcttcctgcacgtgacatatgtgccggcccaggagaagaacttcaccacggccccggccatatgtcacgacgggaaggcccacttcccccgcgagggggtgtttgtgagtaacggaacccactggttcgtgactcagagaaacttctacgaaccacagataatcaccactgacaacaccttcgtcagtgggaattgcgacgtggtgatcgggatcgtgaacaacaccgtgtacgatcccctccagccggagctggactccttcaaggaggagctggacaagtacttcaagaaccacactagccccgacgtggatctcggagacatctccgggatcaacgctagcgtggtgaatatccagaaggagatcgacaggctcaacgaggtggccaagaacctcaacgagagcctgatcgatctccaggagctgggcaagtacgaacagtacatcaagtggccctggtacatctggctcggcttcatcgcaggactgatcgccattgtgatggtcaccatcatgctgtgctgcatgaccagctgctgcagctgcctgaagggctgctgcagctgcgggtcatgctgcaagttcgacgaggacgacagcgagccggtcctgaagggagtgaagctgcactacacttgataa

SEQ ID NO: 132 - RNA, 3810 nt, synthetic construct
  source 1..3810: mol_type = other RNA
atgttcgtgttcctggtgctgctgccgctggtcagctcacagtgcgtgaacctgatcacgcgcacccagagctacacgaacagctttacccggggggtgtactaccccgacaaagtgttccgcagcagcgtgcttcactccactcaggacctgttcctgccgttcttctccaacgtgacctggtttcacgccatcagcgggaccaacgggaccaagcgcttcgacaaccccgtgctcccgttcaacgatggcgtgtacttcgccagcacggagaagagtaacatcatccgggggtggatcttcggcacgaccctggactccaagacccaatcactgctgatcgtgaacaacgccacgaacgtggtgatcaaggtctgcgagttccagttctgcaacgatccattcctggatgtgtactatcacaagaacaacaagtcctggatggagtccgagttccgggtgtactcaagcgccaacaactgtacgttcgagtacgtgtcccagcccttcctgatggacctcgaggggaagcagggcaacttcaagaacctgcgggagttcgtgttcaagaacatcgacgggtacttcaagatctactcgaagcacaccccgatcaatcttggacgcgatctcccgcagggctttagcgccctggagcccctcgtggacctgcccatcgggatcaacatcacccggttccagacgctcctggccctgcacaggagctacctgacgccgggtgactccagctccggctggaccgccggggctgcggcctactacgtgggctacttgcagccccggacgttcttgttgaagtacaacgagaacggcacaatcacggacgccgtggattgtgccctcgacccgctgagcgagaccaagtgcacactcaagagcttcaccgtggagaaggggatctatcagacctcaaatttccgggtccagccgacagagagtatcgttcggttcccgaacatcactaacttgtgcccctttgacgaggtgttcaacgccacgcggtttgcgagcgtgtacgcctggaacaggaagcgcatcagcaactgcgtggcggattactcagtgttgtacaacttcgccccgttcttcgccttcaagtgttacggggtgagccccacaaaactgaacgatctctgcttcaccaacgtgtatgccgacagctttgtgattcgcggcaacgaggtgtcccagatcgcccccgggcagaccgggaatatcgccgactacaactacaagctgccggacgacttcaccggttgcgtgattgcctggaacagcaataagctggactccaaggtgggcgggaattacaactaccgctaccggttgttcaggaagagtaacctgaagccgttcgagcgtgacatcagtaccgagatctaccaggccggcaacaagccctgcaacggggtggcgggggtgaactgttactttccgctgcagagctacgggttcaggcccacctacggggtggggcaccagccctaccgcgtggtggtcctgagcttcgagctgctgcacgcccccgccaccgtctgtgggcccaagaagtccacgaacttggtgaaaaacaagtgcgtgaacttcaacttcaacgggctcacgggcacgggggtgttgacggagagtaacaagaagttcctgccattccagcagttcggcagggacatcgccgacaccacggatgccgtccgggatccccagaccctggagatcctggacatcaccccgtgcagcttcggcggtgtctctgtcattacccccggcaccaacacgtccaaccaggtggccgtcctgtaccagggggtgaactgtactgaggtgccggtggcaatacacgcagaccagttgacccccacctggcgcgtgtacagcacgggcagcaacgtcttccagacacgcgccggctgcttgatcggcgccgagtacgtgaactcatcgtatgagtgtgatattccgattggcgcagggatctgtgcctcctaccagacccagaccaagtcccacaggagggccaggtccgtggccagtcagagtatcatcgcttatacgatgagcctcggcgccgagaacagcgtcgcctacagcaacaactccatcgctatccccacaaatttcaccatcagcgtgaccacggagatcttgcccgtcagcatgaccaagacctccgtggactgcacgatgtacatttgtggggatagcaccgagtgttccaacctgctcctgcagtacgggtcattctgcacgcagctgaagcgtgcattgaccggtattgccgtggagcaggacaagaacactcaggaggtgtttgctcaggtcaagcagatctacaagacgcccccgatcaagtacttcggcggcttcaacttcagccagatcctgcctgacccgagcaaaccctccaagcggagcttcatcgaggacctgctctttaacaaggtgacgctggccgacgccggcttcatcaagcagtacggcgactgtctgggagacatcgctgcccgtgacttgatatgcgcccagaagttcaacggtctgacggtgttgccaccgctgctcacagacgagatgatcgcccagtacacgtccgccctcctggccgggacgatcacatctggttggacgtttggtgccggggctgcattacagatccccttcgccatgcagatggcctacagattcaacggtattggtgtcacgcagaacgtgctttatgagaaccagaagctgattgccaaccagttcaatagcgcaatcgggaagatccaggacagcttgagcagtacggcgagcgccctggggaagctgcaggacgtcgtgaatcacaacgctcaggcactgaacacgttggtgaagcagctctcctcaaagttcggcgcgattagttcggtgctgaacgatattctcagtcggctggaccccccggaggccgaggtccagatagatcgcctcatcacggggcggctgcagagtttgcagacgtacgtgactcagcagctcatcagagctgctgagatccgtgcgtctgcaaacttggcagccaccaagatgagcgagtgtgtgcttggtcagagcaagcgggtcgatttctgcgggaagggctatcacctgatgtccttcccgcagagcgctccccacggcgtggtcttcctgcacgtgacgtatgtgccggcccaggagaagaacttcaccacggccccggccatatgtcacgacgggaaggcccacttcccccgtgagggggtgttcgtgagcaacggaacccactggttcgtgactcagagaaacttctacgagccacagataattaccactgacaacacttttgtcagtggtaattgcgacgtggtcatagggatcgtgaacaacaccgtttacgatcccctccagccggagctggactccttcaaggaggagctggataagtacttcaagaaccacactagccccgacgttgatctcggggacatctccgggatcaatgctagtgtggtgaatatacagaaggagatcgacaggctcaacgaggtggccaagaacctcaacgagagcctgatcgatctccaggagctgggcaagtacgagcagtacatcaagtggccttggtacatctggctcggcttcatcgcaggactgatcgccatcgtgatggtgaccatcatgctgtgctgcatgaccagctgctgcagctgcctgaagggctgctgcagctgcgggtcatgctgcaagttcgacgaggacgacagcgagccggtcctgaagggagtgaagctgcactacacctgataa

SEQ ID NO: 133 - RNA, 3888 nt, synthetic construct
  source 1..3888: mol_type = other RNA
atgttcgtgtttctggtgttgttgccgctggtgtcgagccagtgcgtcaacctgatcacgaggacccagagttacaccaactccttcacgcggggagtgtactaccccgacaaggtgttccgctcgtctgtgctgcacagcacgcaggacctcttcctcccgttcttctccaatgtcacgtggttccacgcgatatcggggacgaacgggacgaagaggttcgataaccccgtgctgccgttcaacgacggggtgtacttcgcttcgacagagaagagtaacatcatccgcgggtggatattcggaaccactctcgactccaagacccagtccttgctgatagtgaacaacgccacgaacgtggtcatcaaggtctgcgaattccagttctgcaacgacccgttcctggacgtgtactatcacaagaacaacaagtcttggatggagagtgagttccgagtgtactcatccgcgaacaactgcaccttcgagtacgtcagccagccgttcctgatggacctcgaggggaagcagggcaacttcaagaacctgcgggagttcgtgttcaagaacattgatgggtacttcaagatctactcgaagcacacgcccatcaatcttggacgcgatctcccgcagggcttcagcgccctggagcccctcgtggacctacccattgggatcaacatcacccggttccagacgctcctggccctgcacaggagctacctgacgccgggtgatagctccagtgggtggaccgccggggctgcagcctactacgtgggctacttgcagccccggacgttcttgttgaagtacaacgagaacgggaccatcacggacgcggtggactgcgcgctcgaccctctgtcggagacgaagtgcaccctgaagtcgttcacggtggaaaaggggatctatcagacctccaacttccgggtccagccgactgagagtatcgttcggttccccaacattactaatctgtgccccttcgacgaggtgttcaacgccacgcggttcgcctccgtgtacgcctggaaccggaagcggatctcgaactgcgtggcggactactcagttttgtacaacttcgccccgttcttcgccttcaagtgctacggggtgagccccacaaaactgaacgacctctgcttcaccaacgtgtacgctgactccttcgtgatccgggggaacgaggtgagtcagatagcgcctgggcagacagggaacatcgccgactataactacaagctgcctgatgatttcacggggtgtgtcatcgcctggaacagcaacaagttggactccaaagtgggcgggaactacaactaccggtaccgcctgttccggaagtccaacttgaagccgttcgagcgggacatatccacggagatctatcaggccggcaataagccctgcaacggagtggcaggagttaattgttactttccgctgcagagctacgggttcaggcccacctacggggtggggcaccagccctaccgcgtggtggtcctgagcttcgagctgctgcacgcccccgccaccgtctgtgggcccaagaagtcgacgaacttggtgaagaacaagtgcgtcaacttcaatttcaacgggctcacaggcacgggggtgctgacggagagtaacaagaaattcctgccattccagcagttcgggcgtgatatcgcggataccaccgacgccgtgcgggacccgcagacgttggagatcctcgatatcacgccctgcagcttcgggggcgtcagtgtgatcacccccggtacaaacacctccaaccaggtggcggtgttgtaccagggggtgaattgcactgaggtccccgtggcgattcacgcggaccagctgaccccgacgtggagggtgtactcgacagggagcaacgtcttccagactcgcgctggctgcctgattggcgccgagtacgtgaactcctcgtacgagtgcgacatccccattggggcggggatctgcgcgtcgtaccagacccagacgaagtctcatcggagggcaaggtcggtggccagtcagtccatcatcgcgtacacgatgagcctgggggccgagaacagtgtcgcctatagcaacaactccatcgctatccccaccaacttcacaatcagcgtgaccaccgagatcctgccggtcagcatgaccaagacctcggtggactgcaccatgtatatctgtggggatagcaccgagtgttccaacctgctcctacagtacggctcgttctgcacgcagctgaagcgtgcactgacgggcatcgctgtggagcaggacaagaacactcaggaggtgtttgctcaggtcaagcagatctacaagacgcccccgatcaaatacttcggcggcttcaacttcagccagatcctgcctgacccgagcaagccctccaagaggtccttcatcgaggacctcctgtttaataaggtcacgctggccgacgcgggctttattaaacagtatggagactgcctgggcgacatcgcggcccgcgacctcatctgtgcgcagaagtttaatggactgactgtgctgccgcccttgctcaccgatgagatgatcgcccagtacacgtccgccctgctggcggggaccattaccagcgggtggacgttcggggctggtgcggcgctgcagatccccttcgccatgcagatggcgtaccgcttcaatgggatcggggtcacccagaacgtgctgtacgagaaccagaagctcatcgccaatcagttcaacagcgcgatcgggaagatccaggactccctgtcgagtacagcctccgcgttggggaagctgcaggacgtcgtgaatcacaatgcccaggcgctgaacacgttggtgaagcagctctcgtcgaagttcggcgcgattagtagtgtgctgaacgatattctcagtcggctggaccccccggaggcggaggtccagatagaccggctcatcactggtcgcctccagagtttgcagacgtacgtgactcagcagctcatcagagctgctgagatacgtgcgtctgcaaacctggcggcgaccaagatgagcgagtgcgtgctggggcagagcaagcgggtggatttctgcgggaagggctaccacctgatgtccttcccgcagagcgcacctcacggggtggtcttcctgcacgtgacatatgtgccggcgcaggagaagaacttcaccaccgcgccggccatatgtcacgacgggaaggcgcacttcccgcgtgagggggtcttcgtgagcaacgggacgcactggttcgtcacccagcggaacttctacgagccacagataatcaccactgacaatacctttgtcagtgggaactgcgacgtggtcatcgggatcgtcaacaacacggtgtacgacccccttcagcccgagctggactcgttcaaggaggaactggacaagtacttcaagaaccacacgagcccggatgttgacctcggagacattagcggcatcaatgcctccgtggtcaacatccagaaggagatcgacaggctcaacgaggtggccaagaacctcaacgagagcctgatcgatctccaggagctcggcaagtacgagcagtacattaagtggccatggtatatatggctggggttcatagcagggctgatcgcgatcgtgatggtcacgatcatgctctgctgtatgacctcgtgctgctcgtgcttgaagggctgctgctcgtgtggttcgtgctgcaagttcgacgaggacgactccgagccggtgctgaagggggtcaagctgcactacacctgataatctagagccgccgctccagctttgcacgtttcgatcccaaaggccctttttagggccgaccattcattgcaaaaaaaa

SEQ ID NO: 134 - RNA, 3900 nt, synthetic construct
  source 1..3900: mol_type = other RNA
agaagctgtctatcgggctccagcggtcatgttcgtgttcctggtgctgctgcctctggtgagcagccagtgcgtgaacctgaccacacgcacccagctgccaccggcttacaccaacagcttcacccgcggggtgtactaccccgacaaggtgttcaggtccagtgtgctgcacagcacacaggacctgttcctgcccttcttcagcaacgtgacttggttccatgtgatcagcggcaccaatgggaccaagcgcttcgacaaccccgtgctgccattcaatgacggcgtgtacttcgccagcatcgagaagagtaacatcatcaggggctggatcttcggcaccaccctcgacagcaagacccagtctctgctgatcgtgaacaacgccacgaacgtggtgattaaggtgtgcgagttccagttctgtaatgatcccttcctggatcacaagaataataaatcctggatggagtccgagttcagggtgtactccagcgccaacaattgcaccttcgagtacgtgtcccagcccttcctgatggacctggagggcaagcaggggaacttcaagaatctgagagagttcgtgttcaagaacatcgatggatacttcaagatctactcgaagcacacccccatcatcgtgagggagccagaggacctgccccaggggttcagcgctctggagccactggtggacctgccaatcgggattaatatcaccaggttccagaccctgctggctctgcaccggagctacctgacccctggggacagctcctctggctggaccgccggggctgcggcctactacgtgggctacctgcagccccggacattcctgctgaagtacaacgagaatgggaccatcacggacgctgtggactgcgcgctggaccctctgtccgagaccaagtgtacactgaagagtttcaccgtggagaaggggatctaccagacctccaacttcagggtgcagccgaccgagagcattgtgcgcttcccaaatatcaccaacctgtgccccttcgacgaggtgttcaatgccactcggttcgcttcagtgtacgcttggaatcggaagaggatctccaactgcgtggcggactacagcgtcctgtacaacctggccccattcttcaccttcaagtgctacggggtgtcccccacaaagctgaacgacctgtgcttcactaatgtgtacgcggacagctttgtgatccgcggcgatgaggtgcggcagattgcccccggccagactgggaacatcgccgactacaactacaagctgccagacgacttcaccggctgcgtgatcgcctggaacagcaacaagctggactccaaggtgtctggcaactataactacctgtatcggctgttccggaagagtaacctgaagcccttcgagcgggacatctccaccgagatctaccaggctggaaataagccatgcaacggcgtggcgggcttcaattgctacttccccctgcgctcttacagcttcaggcccacatacggggtggggcaccagccctacagggtggtggtgctgagcttcgagctcctgcacgcccccgccaccgtgtgtgggccgaagaagagtacaaacctggtgaagaacaagtgcgtgaacttcaacttcaacgggctgaaagggacaggagtgctgacagagtccaacaagaaattcctgccctttcagcagtttggacgggacatcgccgacaccaccgacgccgtgagggatccccagaccctggagatcctggacatcacaccctgtagcttcgggggggtgtctgtgatcacgcctgggacaaacacctccaaccaggtggctgtgctgtaccagggcgtgaattgcactgaggtgccagtggcgattcacgccgaccagctgacacccacctggcgggtgtactctaccggctccaatgtgttccagaccagggccggctgcctgatcggggctgagtacgtgaacaacagctacgaatgcgacatccccatcggggccggcatttgtgccagctaccagacacagaccaagtcccacaggcgggcccggagcgtggcctcccagagcatcatcgcctacacaatgagcctgggggccgagaactccgtggcctacagcaacaactccatcgctatccccacaaacttcacaatcagcgtgaccacagagatcctgcctgtctctatgaccaagacctctgtggactgcaccatgtacatctgtggggatagcaccgagtgcagcaacctgctgctgcagtacggcagcttctgcactcagctgaagcgggccctgactgggatcgccgtggagcaggacaagaatacccaggaggtgtttgcccaggtgaagcagatctacaagacaccccccatcaagtacttcggcgggttcaacttctctcagattctgccagaccccagcaagccctccaagcggtccttcattgaggacctgctgtttaacaaggtgaccctggccgacgccgggttcatcaagcagtacggggactgcctgggcgacatcgccgcccgcgacctcatctgtgcgcagaagtttaaggggctgaccgtgctgccccccctgctgacagatgagatgatcgcccagtacacctccgcgctgctggctgggaccatcacctcggggtggacttttggcgctggagccgcgctgcagatccccttcgccatgcagatggcctatcggttcaacgggatcggggtgacacagaacgtgctgtacgagaaccagaagctgatcgccaatcagtttaacagcgccatcgggaagattcaggacagcctgagctccacagcttccgccctggggaagctgcaggatgtggtgaaccacaacgctcaggccctgaacaccctggtgaagcagctgagctccaagtttggggccatctccagcgtgctgaacgacatcttcagcaggctggacccacccgaggccgaggtccagatcgaccggctcatcacggggcggctgcagagcctgcagacctacgtgactcagcagctcatcagagctgctgagatcagggcttctgccaacctggccgccaccaagatgagcgagtgcgtgctgggccagagcaagcgggtggacttctgtgggaagggctaccacctgatgtccttcccacagagcgccccccacggggtggtgttcctgcacgtgacctacgtgcccgctcaggagaagaacttcaccaccgccccggccatttgccacgacggcaaggcccacttccccagggagggcgtgttcgtgtccaacgggacacactggttcgtgacacagcgcaacttctatgagccccagatcatcacaaccgacaacacattcgtgagcgggaactgcgacgtggtgatcgggatcgtgaacaacaccgtgtacgatcccctgcagcctgagctggactccttcaaggaagaactggacaagtacttcaagaaccacacctccccagacgtggatctgggggacatcagcggcatcaacgccagcgtggtgaacatccagaaggagatcgaccggctgaacgaggtggccaagaatctgaatgagtccctgatcgacctccaggagctggggaagtacgagcagtacatcaagtggccctggtacatctggctggggttcatcgccgggctgatcgccatcgtgatggtgaccatcatgctgtgctgcatgaccagctgctgcagctgcctgaaaggctgctgcagctgcgggtcgtgctgcaagttcgacgaggacgacagcgagcccgtgttgaaaggagtgaaactgcactacacctgataagccgccgctccagctttgcacgtttcgatcccaaaggccctttttagggccgacca

SEQ ID NO: 135 - RNA, 3906 nt, synthetic construct
  source 1..3906: mol_type = other RNA
agaagctgtctatcgggctccagcggtcatgttcgtgttcctggtgctgctgcctctggtgagcagccagtgcgtgaacctgaccacacgcacccagctgccaccggcttacaccaacagcttcacccgcggggtgtactaccccgacaaggtgttcaggtccagtgtgctgcacagcacacaggacctgttcctgcccttcttcagcaacgtgacttggttccatgtgatcagcggcaccaatgggaccaagcgcttcgacaaccccgtgctgccattcaatgacggcgtgtacttcgccagcatcgagaagagtaacatcatcaggggctggatcttcggcaccaccctcgacagcaagacccagtctctgctgatcgtgaacaacgccacgaacgtggtgattaaggtgtgcgagttccagttctgtaatgatcccttcctggatcacaagaataataaatcctggatggagtccgagttcagggtgtactccagcgccaacaattgcaccttcgagtacgtgtcccagcccttcctgatggacctggagggcaagcaggggaacttcaagaatctgagagagttcgtgttcaagaacatcgatggatacttcaagatctactcgaagcacacccccatcatcgtgagggagccagaggacctgccccaggggttcagcgctctggagccactggtggacctgccaatcgggattaatatcaccaggttccagaccctgctggctctgcaccggagctacctgacccctggggacagctcctctggctggaccgccggggctgcggcctactacgtgggctacctgcagccccggacattcctgctgaagtacaacgagaatgggaccatcacggacgctgtggactgcgcgctggaccctctgtccgagaccaagtgtacactgaagagtttcaccgtggagaaggggatctaccagacctccaacttcagggtgcagccgaccgagagcattgtgcgcttcccaaatatcaccaacctgtgccccttcgacgaggtgttcaatgccactcggttcgcttcagtgtacgcttggaatcggaagaggatctccaactgcgtggcggactacagcgtcctgtacaacctggccccattcttcaccttcaagtgctacggggtgtcccccacaaagctgaacgacctgtgcttcactaatgtgtacgcggacagctttgtgatccgcggcgatgaggtgcggcagattgcccccggccagactgggaacatcgccgactacaactacaagctgccagacgacttcaccggctgcgtgatcgcctggaacagcaacaagctggactccaaggtgtctggcaactataactacctgtatcggctgttccggaagagtaacctgaagcccttcgagcgggacatctccaccgagatctaccaggctggaaataagccatgcaacggcgtggcgggcttcaattgctacttccccctgcgctcttacagcttcaggcccacatacggggtggggcaccagccctacagggtggtggtgctgagcttcgagctcctgcacgcccccgccaccgtgtgtgggccgaagaagagtacaaacctggtgaagaacaagtgcgtgaacttcaacttcaacgggctgaaagggacaggagtgctgacagagtccaacaagaaattcctgccctttcagcagtttggacgggacatcgccgacaccaccgacgccgtgagggatccccagaccctggagatcctggacatcacaccctgtagcttcgggggggtgtctgtgatcacgcctgggacaaacacctccaaccaggtggctgtgctgtaccagggcgtgaattgcactgaggtgccagtggcgattcacgccgaccagctgacacccacctggcgggtgtactctaccggctccaatgtgttccagaccagggccggctgcctgatcggggctgagtacgtgaacaacagctacgaatgcgacatccccatcggggccggcatttgtgccagctaccagacacagaccaagtcccacaggcgggcccggagcgtggcctcccagagcatcatcgcctacacaatgagcctgggggccgagaactccgtggcctacagcaacaactccatcgctatccccacaaacttcacaatcagcgtgaccacagagatcctgcctgtctctatgaccaagacctctgtggactgcaccatgtacatctgtggggatagcaccgagtgcagcaacctgctgctgcagtacggcagcttctgcactcagctgaagcgggccctgactgggatcgccgtggagcaggacaagaatacccaggaggtgtttgcccaggtgaagcagatctacaagacaccccccatcaagtacttcggcgggttcaacttctctcagattctgccagaccccagcaagccctccaagcggtccttcattgaggacctgctgtttaacaaggtgaccctggccgacgccgggttcatcaagcagtacggggactgcctgggcgacatcgccgcccgcgacctcatctgtgcgcagaagtttaaggggctgaccgtgctgccccccctgctgacagatgagatgatcgcccagtacacctccgcgctgctggctgggaccatcacctcggggtggacttttggcgctggagccgcgctgcagatccccttcgccatgcagatggcctatcggttcaacgggatcggggtgacacagaacgtgctgtacgagaaccagaagctgatcgccaatcagtttaacagcgccatcgggaagattcaggacagcctgagctccacagcttccgccctggggaagctgcaggatgtggtgaaccacaacgctcaggccctgaacaccctggtgaagcagctgagctccaagtttggggccatctccagcgtgctgaacgacatcttcagcaggctggacccacccgaggccgaggtccagatcgaccggctcatcacggggcggctgcagagcctgcagacctacgtgactcagcagctcatcagagctgctgagatcagggcttctgccaacctggccgccaccaagatgagcgagtgcgtgctgggccagagcaagcgggtggacttctgtgggaagggctaccacctgatgtccttcccacagagcgccccccacggggtggtgttcctgcacgtgacctacgtgcccgctcaggagaagaacttcaccaccgccccggccatttgccacgacggcaaggcccacttccccagggagggcgtgttcgtgtccaacgggacacactggttcgtgacacagcgcaacttctatgagccccagatcatcacaaccgacaacacattcgtgagcgggaactgcgacgtggtgatcgggatcgtgaacaacaccgtgtacgatcccctgcagcctgagctggactccttcaaggaagaactggacaagtacttcaagaaccacacctccccagacgtggatctgggggacatcagcggcatcaacgccagcgtggtgaacatccagaaggagatcgaccggctgaacgaggtggccaagaatctgaatgagtccctgatcgacctccaggagctggggaagtacgagcagtacatcaagtggccctggtacatctggctggggttcatcgccgggctgatcgccatcgtgatggtgaccatcatgctgtgctgcatgaccagctgctgcagctgcctgaaaggctgctgcagctgcgggtcgtgctgcaagttcgacgaggacgacagcgagcccgtgttgaaaggagtgaaactgcactacacctgataatctagagccgccgctccagctttgcacgtttcgatcccaaaggccctttttagggccgacca

SEQ ID NO: 136 - RNA, 3909 nt, synthetic construct
  source 1..3909: mol_type = other RNA
aggagaagctgtctatcgggctccagcggtcatgttcgtgttcctggtgctgctgcctctggtgagcagccagtgcgtgaacctgaccacacgcacccagctgccaccggcttacaccaacagcttcacccgcggggtgtactaccccgacaaggtgttcaggtccagtgtgctgcacagcacacaggacctgttcctgcccttcttcagcaacgtgacttggttccatgtgatcagcggcaccaatgggaccaagcgcttcgacaaccccgtgctgccattcaatgacggcgtgtacttcgccagcatcgagaagagtaacatcatcaggggctggatcttcggcaccaccctcgacagcaagacccagtctctgctgatcgtgaacaacgccacgaacgtggtgattaaggtgtgcgagttccagttctgtaatgatcccttcctggatcacaagaataataaatcctggatggagtccgagttcagggtgtactccagcgccaacaattgcaccttcgagtacgtgtcccagcccttcctgatggacctggagggcaagcaggggaacttcaagaatctgagagagttcgtgttcaagaacatcgatggatacttcaagatctactcgaagcacacccccatcatcgtgagggagccagaggacctgccccaggggttcagcgctctggagccactggtggacctgccaatcgggattaatatcaccaggttccagaccctgctggctctgcaccggagctacctgacccctggggacagctcctctggctggaccgccggggctgcggcctactacgtgggctacctgcagccccggacattcctgctgaagtacaacgagaatgggaccatcacggacgctgtggactgcgcgctggaccctctgtccgagaccaagtgtacactgaagagtttcaccgtggagaaggggatctaccagacctccaacttcagggtgcagccgaccgagagcattgtgcgcttcccaaatatcaccaacctgtgccccttcgacgaggtgttcaatgccactcggttcgcttcagtgtacgcttggaatcggaagaggatctccaactgcgtggcggactacagcgtcctgtacaacctggccccattcttcaccttcaagtgctacggggtgtcccccacaaagctgaacgacctgtgcttcactaatgtgtacgcggacagctttgtgatccgcggcgatgaggtgcggcagattgcccccggccagactgggaacatcgccgactacaactacaagctgccagacgacttcaccggctgcgtgatcgcctggaacagcaacaagctggactccaaggtgtctggcaactataactacctgtatcggctgttccggaagagtaacctgaagcccttcgagcgggacatctccaccgagatctaccaggctggaaataagccatgcaacggcgtggcgggcttcaattgctacttccccctgcgctcttacagcttcaggcccacatacggggtggggcaccagccctacagggtggtggtgctgagcttcgagctcctgcacgcccccgccaccgtgtgtgggccgaagaagagtacaaacctggtgaagaacaagtgcgtgaacttcaacttcaacgggctgaaagggacaggagtgctgacagagtccaacaagaaattcctgccctttcagcagtttggacgggacatcgccgacaccaccgacgccgtgagggatccccagaccctggagatcctggacatcacaccctgtagcttcgggggggtgtctgtgatcacgcctgggacaaacacctccaaccaggtggctgtgctgtaccagggcgtgaattgcactgaggtgccagtggcgattcacgccgaccagctgacacccacctggcgggtgtactctaccggctccaatgtgttccagaccagggccggctgcctgatcggggctgagtacgtgaacaacagctacgaatgcgacatccccatcggggccggcatttgtgccagctaccagacacagaccaagtcccacaggcgggcccggagcgtggcctcccagagcatcatcgcctacacaatgagcctgggggccgagaactccgtggcctacagcaacaactccatcgctatccccacaaacttcacaatcagcgtgaccacagagatcctgcctgtctctatgaccaagacctctgtggactgcaccatgtacatctgtggggatagcaccgagtgcagcaacctgctgctgcagtacggcagcttctgcactcagctgaagcgggccctgactgggatcgccgtggagcaggacaagaatacccaggaggtgtttgcccaggtgaagcagatctacaagacaccccccatcaagtacttcggcgggttcaacttctctcagattctgccagaccccagcaagccctccaagcggtccttcattgaggacctgctgtttaacaaggtgaccctggccgacgccgggttcatcaagcagtacggggactgcctgggcgacatcgccgcccgcgacctcatctgtgcgcagaagtttaaggggctgaccgtgctgccccccctgctgacagatgagatgatcgcccagtacacctccgcgctgctggctgggaccatcacctcggggtggacttttggcgctggagccgcgctgcagatccccttcgccatgcagatggcctatcggttcaacgggatcggggtgacacagaacgtgctgtacgagaaccagaagctgatcgccaatcagtttaacagcgccatcgggaagattcaggacagcctgagctccacagcttccgccctggggaagctgcaggatgtggtgaaccacaacgctcaggccctgaacaccctggtgaagcagctgagctccaagtttggggccatctccagcgtgctgaacgacatcttcagcaggctggacccacccgaggccgaggtccagatcgaccggctcatcacggggcggctgcagagcctgcagacctacgtgactcagcagctcatcagagctgctgagatcagggcttctgccaacctggccgccaccaagatgagcgagtgcgtgctgggccagagcaagcgggtggacttctgtgggaagggctaccacctgatgtccttcccacagagcgccccccacggggtggtgttcctgcacgtgacctacgtgcccgctcaggagaagaacttcaccaccgccccggccatttgccacgacggcaaggcccacttccccagggagggcgtgttcgtgtccaacgggacacactggttcgtgacacagcgcaacttctatgagccccagatcatcacaaccgacaacacattcgtgagcgggaactgcgacgtggtgatcgggatcgtgaacaacaccgtgtacgatcccctgcagcctgagctggactccttcaaggaagaactggacaagtacttcaagaaccacacctccccagacgtggatctgggggacatcagcggcatcaacgccagcgtggtgaacatccagaaggagatcgaccggctgaacgaggtggccaagaatctgaatgagtccctgatcgacctccaggagctggggaagtacgagcagtacatcaagtggccctggtacatctggctggggttcatcgccgggctgatcgccatcgtgatggtgaccatcatgctgtgctgcatgaccagctgctgcagctgcctgaaaggctgctgcagctgcgggtcgtgctgcaagttcgacgaggacgacagcgagcccgtgttgaaaggagtgaaactgcactacacctgataatctagagccgccgctccagctttgcacgtttcgatcccaaaggccctttttagggccgacca

SEQ ID NO: 137 - RNA, 4045 nt, synthetic construct
  source 1..4045: mol_type = other RNA
aggagaagctgtctatcgggctccagcggtcatgttcgtgttcctggtgctgctgcctctggtgagcagccagtgcgtgaacctgaccacacgcacccagctgccaccggcttacaccaacagcttcacccgcggggtgtactaccccgacaaggtgttcaggtccagtgtgctgcacagcacacaggacctgttcctgcccttcttcagcaacgtgacttggttccatgtgatcagcggcaccaatgggaccaagcgcttcgacaaccccgtgctgccattcaatgacggcgtgtacttcgccagcatcgagaagagtaacatcatcaggggctggatcttcggcaccaccctcgacagcaagacccagtctctgctgatcgtgaacaacgccacgaacgtggtgattaaggtgtgcgagttccagttctgtaatgatcccttcctggatcacaagaataataaatcctggatggagtccgagttcagggtgtactccagcgccaacaattgcaccttcgagtacgtgtcccagcccttcctgatggacctggagggcaagcaggggaacttcaagaatctgagagagttcgtgttcaagaacatcgatggatacttcaagatctactcgaagcacacccccatcatcgtgagggagccagaggacctgccccaggggttcagcgctctggagccactggtggacctgccaatcgggattaatatcaccaggttccagaccctgctggctctgcaccggagctacctgacccctggggacagctcctctggctggaccgccggggctgcggcctactacgtgggctacctgcagccccggacattcctgctgaagtacaacgagaatgggaccatcacggacgctgtggactgcgcgctggaccctctgtccgagaccaagtgtacactgaagagtttcaccgtggagaaggggatctaccagacctccaacttcagggtgcagccgaccgagagcattgtgcgcttcccaaatatcaccaacctgtgccccttcgacgaggtgttcaatgccactcggttcgcttcagtgtacgcttggaatcggaagaggatctccaactgcgtggcggactacagcgtcctgtacaacctggccccattcttcaccttcaagtgctacggggtgtcccccacaaagctgaacgacctgtgcttcactaatgtgtacgcggacagctttgtgatccgcggcgatgaggtgcggcagattgcccccggccagactgggaacatcgccgactacaactacaagctgccagacgacttcaccggctgcgtgatcgcctggaacagcaacaagctggactccaaggtgtctggcaactataactacctgtatcggctgttccggaagagtaacctgaagcccttcgagcgggacatctccaccgagatctaccaggctggaaataagccatgcaacggcgtggcgggcttcaattgctacttccccctgcgctcttacagcttcaggcccacatacggggtggggcaccagccctacagggtggtggtgctgagcttcgagctcctgcacgcccccgccaccgtgtgtgggccgaagaagagtacaaacctggtgaagaacaagtgcgtgaacttcaacttcaacgggctgaaagggacaggagtgctgacagagtccaacaagaaattcctgccctttcagcagtttggacgggacatcgccgacaccaccgacgccgtgagggatccccagaccctggagatcctggacatcacaccctgtagcttcgggggggtgtctgtgatcacgcctgggacaaacacctccaaccaggtggctgtgctgtaccagggcgtgaattgcactgaggtgccagtggcgattcacgccgaccagctgacacccacctggcgggtgtactctaccggctccaatgtgttccagaccagggccggctgcctgatcggggctgagtacgtgaacaacagctacgaatgcgacatccccatcggggccggcatttgtgccagctaccagacacagaccaagtcccacaggcgggcccggagcgtggcctcccagagcatcatcgcctacacaatgagcctgggggccgagaactccgtggcctacagcaacaactccatcgctatccccacaaacttcacaatcagcgtgaccacagagatcctgcctgtctctatgaccaagacctctgtggactgcaccatgtacatctgtggggatagcaccgagtgcagcaacctgctgctgcagtacggcagcttctgcactcagctgaagcgggccctgactgggatcgccgtggagcaggacaagaatacccaggaggtgtttgcccaggtgaagcagatctacaagacaccccccatcaagtacttcggcgggttcaacttctctcagattctgccagaccccagcaagccctccaagcggtccttcattgaggacctgctgtttaacaaggtgaccctggccgacgccgggttcatcaagcagtacggggactgcctgggcgacatcgccgcccgcgacctcatctgtgcgcagaagtttaaggggctgaccgtgctgccccccctgctgacagatgagatgatcgcccagtacacctccgcgctgctggctgggaccatcacctcggggtggacttttggcgctggagccgcgctgcagatccccttcgccatgcagatggcctatcggttcaacgggatcggggtgacacagaacgtgctgtacgagaaccagaagctgatcgccaatcagtttaacagcgccatcgggaagattcaggacagcctgagctccacagcttccgccctggggaagctgcaggatgtggtgaaccacaacgctcaggccctgaacaccctggtgaagcagctgagctccaagtttggggccatctccagcgtgctgaacgacatcttcagcaggctggacccacccgaggccgaggtccagatcgaccggctcatcacggggcggctgcagagcctgcagacctacgtgactcagcagctcatcagagctgctgagatcagggcttctgccaacctggccgccaccaagatgagcgagtgcgtgctgggccagagcaagcgggtggacttctgtgggaagggctaccacctgatgtccttcccacagagcgccccccacggggtggtgttcctgcacgtgacctacgtgcccgctcaggagaagaacttcaccaccgccccggccatttgccacgacggcaaggcccacttccccagggagggcgtgttcgtgtccaacgggacacactggttcgtgacacagcgcaacttctatgagccccagatcatcacaaccgacaacacattcgtgagcgggaactgcgacgtggtgatcgggatcgtgaacaacaccgtgtacgatcccctgcagcctgagctggactccttcaaggaagaactggacaagtacttcaagaaccacacctccccagacgtggatctgggggacatcagcggcatcaacgccagcgtggtgaacatccagaaggagatcgaccggctgaacgaggtggccaagaatctgaatgagtccctgatcgacctccaggagctggggaagtacgagcagtacatcaagtggccctggtacatctggctggggttcatcgccgggctgatcgccatcgtgatggtgaccatcatgctgtgctgcatgaccagctgctgcagctgcctgaaaggctgctgcagctgcgggtcgtgctgcaagttcgacgaggacgacagcgagcccgtgttgaaaggagtgaaactgcactacacctgataatctagagccgccgctccagctttgcacgtttcgatcccaaaggccctttttagggccgaccattcattgcaaaaaaaaaaaaaaaaaaaaaaaaaaaaaagcatatgactaaaaaaaaaaaaaaaaaaaaaaaaaaaaaaaaaaaaaaaaaaaaaaaaaaaaaaaaaaaaaaaaaaaaaaaaaaaaaaaaaaaaaaaa

SEQ ID NO: 138 - RNA, 3900 nt, synthetic construct
  source 1..3900: mol_type = other RNA
agaagctgtctatcgggctccagcggtcatgttcgtgttcctggtgctgctccccctggtcagctcacagtgcgtgaacctgaccactcgcacacagctgcccccagcttacactaactccttcacccgcggggtgtactaccccgacaaggtgttcaggagtagtgtgctgcacagcacccaggacctctttctcccattcttctccaacgtcacgtggttccacgtgatcagcgggacaaatgggacaaagaggttcgacaaccctgtgctgcccttcaacgatggggtgtacttcgcctccatcgagaagagtaacatcatcaggggctggatctttgggaccaccctggactcaaagacccagtccctgctgatcgtgaacaacgccaccaatgtggtcatcaaggtgtgcgagttccagttctgcaacgatccattcctggatcacaaaaacaacaagagctggatggagagtgagttccgggtgtacagcagcgcgaacaactgcacgttcgaatacgtgtcacagccattcctgatggacctggaggggaagcagggcaattttaagaacctgcgcgagttcgtcttcaagaacatcgacgggtattttaagatctactccaagcacacacccatcatcgtcagggagcccgaggatctgccccagggcttctctgccctggagccgctggtggacctccccataggaattaacatcaccaggttccagacactcctggccctgcacaggagctacctgacacctggtgacagttccagtgggtggacggccggggctgcagcctactacgtgggctacctgcagccccggaccttcctgctgaagtacaacgagaatgggaccattacagacgctgtggactgcgcactggatcctctgtccgagaccaagtgtacactgaagagtttcaccgtggagaaggggatctaccagacctccaacttcagggtgcagccgaccgagagcattgtgcgcttcccaaatatcacaaacctgtgccccttcgacgaggtgttcaatgctactcggttcgcttcagtgtacgcttggaatcggaagaggatcagcaactgcgtggcagactacagcgtcctgtacaacctggccccattcttcacattcaagtgctacggcgtctcccccacgaagctgaatgacctgtgcttcaccaacgtgtacgcagacagcttcgtgatccggggagacgaggtccgccagatcgctccagggcagaccggcaacatcgccgactacaactacaagctccctgacgacttcaccgggtgtgtgatcgcttggaacagcaacaagctggacagcaaggtgtccggcaactacaactacctgtaccgcctgtttcgcaagtccaacctgaagcccttcgagcgggatatctccacagagatctaccaggctggcaacaagccctgcaacggcgtggcgggcttcaactgctacttcccactgaggtcttactccttcaggcccacatacggggtggggcaccagccctaccgcgtggtggtgctcagctttgagctcctccacgcccccgccaccgtgtgtgggcccaagaagagtaccaacctggtgaagaacaagtgcgtgaacttcaacttcaacgggctcaaggggaccggcgtcctcaccgagtccaacaagaagttcctgcccttccagcagtttggcagagacatcgccgacactacagacgcggtccgggatccccagaccctggagatcctggacatcacgccctgtagcttcggcggtgtctctgtcatcactcccggtaccaacacatccaaccaggtggcggtgctgtaccagggcgtgaattgcactgaggtgccagtggcaattcacgccgatcagctgacacccacctggcgggtgtacagtaccgggagcaacgtgttccagacacgggcaggatgtctgatcggcgctgagtacgtgaacaacagctacgagtgcgacatccccattggagcgggcatctgcgccagctaccagacccagactaagagccacaggcgggcccgctctgtggcctcacagagcatcatcgcctacactatgagtctgggggctgagaacagcgtggcctactccaacaacagcatcgcaatcccaaccaacttcacaatcagcgtcaccacggagatcctgcccgtgtctatgaccaagacctcagtggactgcacaatgtacatctgcggggacagcaccgagtgttccaacctcctgctccagtacggcagtttctgtacacagctcaaaagggccctgacaggtatagccgtggagcaggacaagaacactcaggaggtgttcgcgcaggtgaagcagatctacaagactcctcccatcaagtactttggagggtttaacttcagccagatcctgcctgaccccagcaaaccctccaagaggagcttcatcgaggatctgctctttaacaaagtcaccctcgccgacgcagggttcattaagcagtacggtgactgtctgggagatatcgccgctcgggatctcatctgtgcgcagaagttcaagggactgaccgtcctgccacccctgctcacggatgagatgatcgcccagtacaccagcgccctgctggctgggacgatcacttcaggttggactttcggggcaggcgccgccctgcagatccccttcgccatgcagatggcctacaggttcaacgggatcggcgtgacacagaatgtgctgtacgagaatcagaagctgatcgccaaccagttcaacagcgcgatcggcaagatccaggactcactctccagcaccgcaagcgccctggggaagctccaggacgtggtcaaccacaacgcacaggctctgaacaccctcgtcaagcagctgagcagcaagttcggcgccatctcttctgtgctgaatgacatcttcagccggctggatcccccagaggctgaggtccagatcgaccggctgatcactggtcggctgcagagtctgcagacctacgtgactcagcagctgatcagggcagccgagatccgggcctcagccaacctggccgccacgaagatgtcagagtgcgtgctgggccagtccaagagggtggacttctgtgggaagggctaccacctgatgtccttcccacagagcgcccctcacggagtggtgttcctgcacgtcacctacgtgccagcacaggagaagaacttcacaacagctcccgcaatctgccacgacgggaaggcccacttcccccgggagggggtcttcgtgtcaaacggcacccactggttcgtgacacagcgcaacttctacgagccacagatcatcaccactgacaacaccttcgtcagtgggaactgtgacgtggtgatcggcatcgtcaacaacaccgtgtacgacccccttcaacccgaactggatagcttcaaggaggagctggacaagtacttcaagaaccacacctccccagacgtggacctgggcgacattagcggcatcaacgctagtgtcgtcaacatccagaaggagatcgacaggctcaacgaggtggccaaaaacctcaacgagagcctgatcgatctccaggagctggggaagtacgagcagtacatcaagtggccttggtacatctggctcgggttcatcgcagggctgatcgccatcgtgatggtgacaatcatgctgtgctgcatgaccagctgctgcagctgcctgaagggctgctgcagctgcgggagctgttgcaagttcgacgaggacgactcagagcctgtgctcaagggggtgaagctgcactatacttgataagccgccgctccagctttgcacgtttcgatcccaaaggccctttttagggccgacca

SEQ ID NO: 139 - RNA, 3906 nt, synthetic construct
  source 1..3906: mol_type = other RNA
agaagctgtctatcgggctccagcggtcatgttcgtgttcctggtgctgctccccctggtcagctcacagtgcgtgaacctgaccactcgcacacagctgcccccagcttacactaactccttcacccgcggggtgtactaccccgacaaggtgttcaggagtagtgtgctgcacagcacccaggacctctttctcccattcttctccaacgtcacgtggttccacgtgatcagcgggacaaatgggacaaagaggttcgacaaccctgtgctgcccttcaacgatggggtgtacttcgcctccatcgagaagagtaacatcatcaggggctggatctttgggaccaccctggactcaaagacccagtccctgctgatcgtgaacaacgccaccaatgtggtcatcaaggtgtgcgagttccagttctgcaacgatccattcctggatcacaaaaacaacaagagctggatggagagtgagttccgggtgtacagcagcgcgaacaactgcacgttcgaatacgtgtcacagccattcctgatggacctggaggggaagcagggcaattttaagaacctgcgcgagttcgtcttcaagaacatcgacgggtattttaagatctactccaagcacacacccatcatcgtcagggagcccgaggatctgccccagggcttctctgccctggagccgctggtggacctccccataggaattaacatcaccaggttccagacactcctggccctgcacaggagctacctgacacctggtgacagttccagtgggtggacggccggggctgcagcctactacgtgggctacctgcagccccggaccttcctgctgaagtacaacgagaatgggaccattacagacgctgtggactgcgcactggatcctctgtccgagaccaagtgtacactgaagagtttcaccgtggagaaggggatctaccagacctccaacttcagggtgcagccgaccgagagcattgtgcgcttcccaaatatcacaaacctgtgccccttcgacgaggtgttcaatgctactcggttcgcttcagtgtacgcttggaatcggaagaggatcagcaactgcgtggcagactacagcgtcctgtacaacctggccccattcttcacattcaagtgctacggcgtctcccccacgaagctgaatgacctgtgcttcaccaacgtgtacgcagacagcttcgtgatccggggagacgaggtccgccagatcgctccagggcagaccggcaacatcgccgactacaactacaagctccctgacgacttcaccgggtgtgtgatcgcttggaacagcaacaagctggacagcaaggtgtccggcaactacaactacctgtaccgcctgtttcgcaagtccaacctgaagcccttcgagcgggatatctccacagagatctaccaggctggcaacaagccctgcaacggcgtggcgggcttcaactgctacttcccactgaggtcttactccttcaggcccacatacggggtggggcaccagccctaccgcgtggtggtgctcagctttgagctcctccacgcccccgccaccgtgtgtgggcccaagaagagtaccaacctggtgaagaacaagtgcgtgaacttcaacttcaacgggctcaaggggaccggcgtcctcaccgagtccaacaagaagttcctgcccttccagcagtttggcagagacatcgccgacactacagacgcggtccgggatccccagaccctggagatcctggacatcacgccctgtagcttcggcggtgtctctgtcatcactcccggtaccaacacatccaaccaggtggcggtgctgtaccagggcgtgaattgcactgaggtgccagtggcaattcacgccgatcagctgacacccacctggcgggtgtacagtaccgggagcaacgtgttccagacacgggcaggatgtctgatcggcgctgagtacgtgaacaacagctacgagtgcgacatccccattggagcgggcatctgcgccagctaccagacccagactaagagccacaggcgggcccgctctgtggcctcacagagcatcatcgcctacactatgagtctgggggctgagaacagcgtggcctactccaacaacagcatcgcaatcccaaccaacttcacaatcagcgtcaccacggagatcctgcccgtgtctatgaccaagacctcagtggactgcacaatgtacatctgcggggacagcaccgagtgttccaacctcctgctccagtacggcagtttctgtacacagctcaaaagggccctgacaggtatagccgtggagcaggacaagaacactcaggaggtgttcgcgcaggtgaagcagatctacaagactcctcccatcaagtactttggagggtttaacttcagccagatcctgcctgaccccagcaaaccctccaagaggagcttcatcgaggatctgctctttaacaaagtcaccctcgccgacgcagggttcattaagcagtacggtgactgtctgggagatatcgccgctcgggatctcatctgtgcgcagaagttcaagggactgaccgtcctgccacccctgctcacggatgagatgatcgcccagtacaccagcgccctgctggctgggacgatcacttcaggttggactttcggggcaggcgccgccctgcagatccccttcgccatgcagatggcctacaggttcaacgggatcggcgtgacacagaatgtgctgtacgagaatcagaagctgatcgccaaccagttcaacagcgcgatcggcaagatccaggactcactctccagcaccgcaagcgccctggggaagctccaggacgtggtcaaccacaacgcacaggctctgaacaccctcgtcaagcagctgagcagcaagttcggcgccatctcttctgtgctgaatgacatcttcagccggctggatcccccagaggctgaggtccagatcgaccggctgatcactggtcggctgcagagtctgcagacctacgtgactcagcagctgatcagggcagccgagatccgggcctcagccaacctggccgccacgaagatgtcagagtgcgtgctgggccagtccaagagggtggacttctgtgggaagggctaccacctgatgtccttcccacagagcgcccctcacggagtggtgttcctgcacgtcacctacgtgccagcacaggagaagaacttcacaacagctcccgcaatctgccacgacgggaaggcccacttcccccgggagggggtcttcgtgtcaaacggcacccactggttcgtgacacagcgcaacttctacgagccacagatcatcaccactgacaacaccttcgtcagtgggaactgtgacgtggtgatcggcatcgtcaacaacaccgtgtacgacccccttcaacccgaactggatagcttcaaggaggagctggacaagtacttcaagaaccacacctccccagacgtggacctgggcgacattagcggcatcaacgctagtgtcgtcaacatccagaaggagatcgacaggctcaacgaggtggccaaaaacctcaacgagagcctgatcgatctccaggagctggggaagtacgagcagtacatcaagtggccttggtacatctggctcgggttcatcgcagggctgatcgccatcgtgatggtgacaatcatgctgtgctgcatgaccagctgctgcagctgcctgaagggctgctgcagctgcgggagctgttgcaagttcgacgaggacgactcagagcctgtgctcaagggggtgaagctgcactatacttgataatctagagccgccgctccagctttgcacgtttcgatcccaaaggccctttttagggccgacca

SEQ ID NO: 140 - RNA, 3909 nt, synthetic construct
  source 1..3909: mol_type = other RNA
aggagaagctgtctatcgggctccagcggtcatgttcgtgttcctggtgctgctccccctggtcagctcacagtgcgtgaacctgaccactcgcacacagctgcccccagcttacactaactccttcacccgcggggtgtactaccccgacaaggtgttcaggagtagtgtgctgcacagcacccaggacctctttctcccattcttctccaacgtcacgtggttccacgtgatcagcgggacaaatgggacaaagaggttcgacaaccctgtgctgcccttcaacgatggggtgtacttcgcctccatcgagaagagtaacatcatcaggggctggatctttgggaccaccctggactcaaagacccagtccctgctgatcgtgaacaacgccaccaatgtggtcatcaaggtgtgcgagttccagttctgcaacgatccattcctggatcacaaaaacaacaagagctggatggagagtgagttccgggtgtacagcagcgcgaacaactgcacgttcgaatacgtgtcacagccattcctgatggacctggaggggaagcagggcaattttaagaacctgcgcgagttcgtcttcaagaacatcgacgggtattttaagatctactccaagcacacacccatcatcgtcagggagcccgaggatctgccccagggcttctctgccctggagccgctggtggacctccccataggaattaacatcaccaggttccagacactcctggccctgcacaggagctacctgacacctggtgacagttccagtgggtggacggccggggctgcagcctactacgtgggctacctgcagccccggaccttcctgctgaagtacaacgagaatgggaccattacagacgctgtggactgcgcactggatcctctgtccgagaccaagtgtacactgaagagtttcaccgtggagaaggggatctaccagacctccaacttcagggtgcagccgaccgagagcattgtgcgcttcccaaatatcacaaacctgtgccccttcgacgaggtgttcaatgctactcggttcgcttcagtgtacgcttggaatcggaagaggatcagcaactgcgtggcagactacagcgtcctgtacaacctggccccattcttcacattcaagtgctacggcgtctcccccacgaagctgaatgacctgtgcttcaccaacgtgtacgcagacagcttcgtgatccggggagacgaggtccgccagatcgctccagggcagaccggcaacatcgccgactacaactacaagctccctgacgacttcaccgggtgtgtgatcgcttggaacagcaacaagctggacagcaaggtgtccggcaactacaactacctgtaccgcctgtttcgcaagtccaacctgaagcccttcgagcgggatatctccacagagatctaccaggctggcaacaagccctgcaacggcgtggcgggcttcaactgctacttcccactgaggtcttactccttcaggcccacatacggggtggggcaccagccctaccgcgtggtggtgctcagctttgagctcctccacgcccccgccaccgtgtgtgggcccaagaagagtaccaacctggtgaagaacaagtgcgtgaacttcaacttcaacgggctcaaggggaccggcgtcctcaccgagtccaacaagaagttcctgcccttccagcagtttggcagagacatcgccgacactacagacgcggtccgggatccccagaccctggagatcctggacatcacgccctgtagcttcggcggtgtctctgtcatcactcccggtaccaacacatccaaccaggtggcggtgctgtaccagggcgtgaattgcactgaggtgccagtggcaattcacgccgatcagctgacacccacctggcgggtgtacagtaccgggagcaacgtgttccagacacgggcaggatgtctgatcggcgctgagtacgtgaacaacagctacgagtgcgacatccccattggagcgggcatctgcgccagctaccagacccagactaagagccacaggcgggcccgctctgtggcctcacagagcatcatcgcctacactatgagtctgggggctgagaacagcgtggcctactccaacaacagcatcgcaatcccaaccaacttcacaatcagcgtcaccacggagatcctgcccgtgtctatgaccaagacctcagtggactgcacaatgtacatctgcggggacagcaccgagtgttccaacctcctgctccagtacggcagtttctgtacacagctcaaaagggccctgacaggtatagccgtggagcaggacaagaacactcaggaggtgttcgcgcaggtgaagcagatctacaagactcctcccatcaagtactttggagggtttaacttcagccagatcctgcctgaccccagcaaaccctccaagaggagcttcatcgaggatctgctctttaacaaagtcaccctcgccgacgcagggttcattaagcagtacggtgactgtctgggagatatcgccgctcgggatctcatctgtgcgcagaagttcaagggactgaccgtcctgccacccctgctcacggatgagatgatcgcccagtacaccagcgccctgctggctgggacgatcacttcaggttggactttcggggcaggcgccgccctgcagatccccttcgccatgcagatggcctacaggttcaacgggatcggcgtgacacagaatgtgctgtacgagaatcagaagctgatcgccaaccagttcaacagcgcgatcggcaagatccaggactcactctccagcaccgcaagcgccctggggaagctccaggacgtggtcaaccacaacgcacaggctctgaacaccctcgtcaagcagctgagcagcaagttcggcgccatctcttctgtgctgaatgacatcttcagccggctggatcccccagaggctgaggtccagatcgaccggctgatcactggtcggctgcagagtctgcagacctacgtgactcagcagctgatcagggcagccgagatccgggcctcagccaacctggccgccacgaagatgtcagagtgcgtgctgggccagtccaagagggtggacttctgtgggaagggctaccacctgatgtccttcccacagagcgcccctcacggagtggtgttcctgcacgtcacctacgtgccagcacaggagaagaacttcacaacagctcccgcaatctgccacgacgggaaggcccacttcccccgggagggggtcttcgtgtcaaacggcacccactggttcgtgacacagcgcaacttctacgagccacagatcatcaccactgacaacaccttcgtcagtgggaactgtgacgtggtgatcggcatcgtcaacaacaccgtgtacgacccccttcaacccgaactggatagcttcaaggaggagctggacaagtacttcaagaaccacacctccccagacgtggacctgggcgacattagcggcatcaacgctagtgtcgtcaacatccagaaggagatcgacaggctcaacgaggtggccaaaaacctcaacgagagcctgatcgatctccaggagctggggaagtacgagcagtacatcaagtggccttggtacatctggctcgggttcatcgcagggctgatcgccatcgtgatggtgacaatcatgctgtgctgcatgaccagctgctgcagctgcctgaagggctgctgcagctgcgggagctgttgcaagttcgacgaggacgactcagagcctgtgctcaagggggtgaagctgcactatacttgataatctagagccgccgctccagctttgcacgtttcgatcccaaaggccctttttagggccgacca

SEQ ID NO: 141 - RNA, 4045 nt, synthetic construct
  source 1..4045: mol_type = other RNA
aggagaagctgtctatcgggctccagcggtcatgttcgtgttcctggtgctgctccccctggtcagctcacagtgcgtgaacctgaccactcgcacacagctgcccccagcttacactaactccttcacccgcggggtgtactaccccgacaaggtgttcaggagtagtgtgctgcacagcacccaggacctctttctcccattcttctccaacgtcacgtggttccacgtgatcagcgggacaaatgggacaaagaggttcgacaaccctgtgctgcccttcaacgatggggtgtacttcgcctccatcgagaagagtaacatcatcaggggctggatctttgggaccaccctggactcaaagacccagtccctgctgatcgtgaacaacgccaccaatgtggtcatcaaggtgtgcgagttccagttctgcaacgatccattcctggatcacaaaaacaacaagagctggatggagagtgagttccgggtgtacagcagcgcgaacaactgcacgttcgaatacgtgtcacagccattcctgatggacctggaggggaagcagggcaattttaagaacctgcgcgagttcgtcttcaagaacatcgacgggtattttaagatctactccaagcacacacccatcatcgtcagggagcccgaggatctgccccagggcttctctgccctggagccgctggtggacctccccataggaattaacatcaccaggttccagacactcctggccctgcacaggagctacctgacacctggtgacagttccagtgggtggacggccggggctgcagcctactacgtgggctacctgcagccccggaccttcctgctgaagtacaacgagaatgggaccattacagacgctgtggactgcgcactggatcctctgtccgagaccaagtgtacactgaagagtttcaccgtggagaaggggatctaccagacctccaacttcagggtgcagccgaccgagagcattgtgcgcttcccaaatatcacaaacctgtgccccttcgacgaggtgttcaatgctactcggttcgcttcagtgtacgcttggaatcggaagaggatcagcaactgcgtggcagactacagcgtcctgtacaacctggccccattcttcacattcaagtgctacggcgtctcccccacgaagctgaatgacctgtgcttcaccaacgtgtacgcagacagcttcgtgatccggggagacgaggtccgccagatcgctccagggcagaccggcaacatcgccgactacaactacaagctccctgacgacttcaccgggtgtgtgatcgcttggaacagcaacaagctggacagcaaggtgtccggcaactacaactacctgtaccgcctgtttcgcaagtccaacctgaagcccttcgagcgggatatctccacagagatctaccaggctggcaacaagccctgcaacggcgtggcgggcttcaactgctacttcccactgaggtcttactccttcaggcccacatacggggtggggcaccagccctaccgcgtggtggtgctcagctttgagctcctccacgcccccgccaccgtgtgtgggcccaagaagagtaccaacctggtgaagaacaagtgcgtgaacttcaacttcaacgggctcaaggggaccggcgtcctcaccgagtccaacaagaagttcctgcccttccagcagtttggcagagacatcgccgacactacagacgcggtccgggatccccagaccctggagatcctggacatcacgccctgtagcttcggcggtgtctctgtcatcactcccggtaccaacacatccaaccaggtggcggtgctgtaccagggcgtgaattgcactgaggtgccagtggcaattcacgccgatcagctgacacccacctggcgggtgtacagtaccgggagcaacgtgttccagacacgggcaggatgtctgatcggcgctgagtacgtgaacaacagctacgagtgcgacatccccattggagcgggcatctgcgccagctaccagacccagactaagagccacaggcgggcccgctctgtggcctcacagagcatcatcgcctacactatgagtctgggggctgagaacagcgtggcctactccaacaacagcatcgcaatcccaaccaacttcacaatcagcgtcaccacggagatcctgcccgtgtctatgaccaagacctcagtggactgcacaatgtacatctgcggggacagcaccgagtgttccaacctcctgctccagtacggcagtttctgtacacagctcaaaagggccctgacaggtatagccgtggagcaggacaagaacactcaggaggtgttcgcgcaggtgaagcagatctacaagactcctcccatcaagtactttggagggtttaacttcagccagatcctgcctgaccccagcaaaccctccaagaggagcttcatcgaggatctgctctttaacaaagtcaccctcgccgacgcagggttcattaagcagtacggtgactgtctgggagatatcgccgctcgggatctcatctgtgcgcagaagttcaagggactgaccgtcctgccacccctgctcacggatgagatgatcgcccagtacaccagcgccctgctggctgggacgatcacttcaggttggactttcggggcaggcgccgccctgcagatccccttcgccatgcagatggcctacaggttcaacgggatcggcgtgacacagaatgtgctgtacgagaatcagaagctgatcgccaaccagttcaacagcgcgatcggcaagatccaggactcactctccagcaccgcaagcgccctggggaagctccaggacgtggtcaaccacaacgcacaggctctgaacaccctcgtcaagcagctgagcagcaagttcggcgccatctcttctgtgctgaatgacatcttcagccggctggatcccccagaggctgaggtccagatcgaccggctgatcactggtcggctgcagagtctgcagacctacgtgactcagcagctgatcagggcagccgagatccgggcctcagccaacctggccgccacgaagatgtcagagtgcgtgctgggccagtccaagagggtggacttctgtgggaagggctaccacctgatgtccttcccacagagcgcccctcacggagtggtgttcctgcacgtcacctacgtgccagcacaggagaagaacttcacaacagctcccgcaatctgccacgacgggaaggcccacttcccccgggagggggtcttcgtgtcaaacggcacccactggttcgtgacacagcgcaacttctacgagccacagatcatcaccactgacaacaccttcgtcagtgggaactgtgacgtggtgatcggcatcgtcaacaacaccgtgtacgacccccttcaacccgaactggatagcttcaaggaggagctggacaagtacttcaagaaccacacctccccagacgtggacctgggcgacattagcggcatcaacgctagtgtcgtcaacatccagaaggagatcgacaggctcaacgaggtggccaaaaacctcaacgagagcctgatcgatctccaggagctggggaagtacgagcagtacatcaagtggccttggtacatctggctcgggttcatcgcagggctgatcgccatcgtgatggtgacaatcatgctgtgctgcatgaccagctgctgcagctgcctgaagggctgctgcagctgcgggagctgttgcaagttcgacgaggacgactcagagcctgtgctcaagggggtgaagctgcactatacttgataatctagagccgccgctccagctttgcacgtttcgatcccaaaggccctttttagggccgaccattcattgcaaaaaaaaaaaaaaaaaaaaaaaaaaaaaagcatatgactaaaaaaaaaaaaaaaaaaaaaaaaaaaaaaaaaaaaaaaaaaaaaaaaaaaaaaaaaaaaaaaaaaaaaaaaaaaaaaaaaaaaaaaa

SEQ ID NO: 142 - RNA, 3900 nt, synthetic construct
  source 1..3900: mol_type = other RNA
agaagctgtctatcgggctccagcggtcatgttcgtgttcctggtgctgcttccgctggtcagcagccagtgcgtgaacctgaccacgcggacgcagctgccacccgcgtacaccaatagcttcactcggggggtctactacccggacaaggtcttccggagcagcgtgctgcacagcacgcaggacctcttcctgccgttcttctcgaacgtcacgtggttccacgtgatcagcgggacgaacggcacgaagaggttcgacaaccccgtgctcccgttcaatgacggggtgtatttcgccagcatcgagaagagtaacatcattcgggggtggatcttcggcactaccttggactccaagacgcagagcctgctcatcgtgaacaacgccaccaacgtggtgatcaaggtctgcgagttccagttctgcaacgaccccttcttggaccacaagaacaacaagagctggatggagtccgagttcagagtctacagcagcgccaacaattgcaccttcgaatacgtgagccagccgttcctgatggacctggaaggcaagcagggcaacttcaagaacttgcgcgagtttgtcttcaagaacatcgacggctacttcaagatctacagcaagcacacccccatcattgtgcgggagccggaggacctgccgcagggcttcagcgctctggagccgctggtggacctgcccatcggcatcaacatcacgcggttccagacgctgttggccctgcacaggtcctacctgactccgggagactccagctccgggtggacggccggggctgcagcctactatgtgggctacctgcagccccggaccttcttgttgaagtacaacgagaacggcacgatcacggacgccgtggattgtgccttggaccccctgagcgagaccaagtgtaccctgaagtccttcaccgtggagaaggggatctaccagacctccaacttccgggtccagccgactgagagcatcgtgcggtttcccaacattaccaacttgtgccccttcgatgaggtgttcaacgccacgcggttcgccagcgtgtacgcctggaacaggaagcgcatcagcaactgcgtggccgactactcagtgttgtacaacctcgccccgttcttcaccttcaagtgctacggggtgagccctacaaagctgaacgacctctgcttcaccaacgtgtacgccgacagctttgtgattcgcggcgacgaggtccggcagatcgccccagggcagaccggcaatatcgctgactacaactacaagctgcctgacgatttcaccgggtgcgtgatcgcctggaacagcaacaagctggacagcaaggtgtcagggaactacaattacctgtaccggttgttcaggaagagtaacctgaagccgttcgagcgtgacatcagcaccgagatctaccaggccggcaacaagccctgcaacggggtggcgggattcaactgctactttccgttgcgctcctattcctttcggcccacctacggggtgggccaccagccctacagggtggtggtgctctccttcgagctgctccacgcaccggccacggtgtgtgggccgaagaagagtaccaacctggtgaagaataagtgcgtcaacttcaacttcaacgggctgaaaggaacaggagtgctgacggagagcaacaagaaattcctgccattccagcagttcgggcgcgacatcgctgacaccaccgacgctgtgcgggacccccagaccctggagatcctggacatcaccccttgcagcttcggcggcgtcagcgtgatcacgcccgggaccaacacatccaaccaggtggccgtgctgtaccagggcgtgaactgcaccgaggtgccggtggccatccacgccgatcagctgacgcccacctggcgggtgtactccacgggcagcaacgtcttccagacacgcgccggctgcttgatcggagccgagtacgtcaataacagctacgagtgcgacattcccatcggggccgggatctgcgccagctaccagacgcagaccaagtcccaccggcgcgctcggagcgtggcctcccagagcatcatcgcctacacgatgagcctgggggccgagaacagcgtcgcttatagcaacaacagcatcgctatccccaccaactttacaattagcgtgaccacggagatcttgcccgtcagcatgaccaagacctccgtggactgcaccatgtacatctgcggggatagcaccgagtgctccaacctgctcctgcagtacgggtccttctgcacgcagttgaagcgcgcattgaccggcatcgcagtggagcaggacaagaacacgcaggaggtgtttgctcaggtcaagcagatctacaagacgcccccgatcaagtacttcgggggcttcaacttcagccagatcctgcctgacccgagcaagccctccaagcgtagcttcatcgaggacctgctgttcaataaagtgacgctggcagacgccggcttcatcaagcagtacggcgactgtctgggggacatcgctgcccgggacctcatctgtgcccagaagttcaagggcctcacggtcctgccgcccctgctcacagatgagatgatcgcccagtacacgagcgccctgctcgctgggaccatcaccagcgggtggacgttcggcgcgggcgctgcattacagatccccttcgcgatgcagatggcctacagatttaacggtatcggcgtcacgcagaacgtgctgtacgagaaccagaagctgatcgccaaccagttcaacagcgccatcgggaagatccaggacagcttgagcagcaccgcctctgccctggggaagctgcaggacgtcgtgaatcacaatgcccaggccttgaacacgttggtgaagcagctctcatcgaagttcggcgccatcagcagcgtgctgaacgacatcttcagtcggctggaccccccggaggcggaggtccagatcgaccgcctgatcacggggaggctgcagagcttgcagacgtacgtgactcagcagctcatcagggctgctgagatccgggcgtctgccaacctggctgccaccaagatgtccgaatgcgtcttggggcagtccaagcgggtggacttctgcgggaagggctaccacctgatgtccttcccgcagagcgcaccccacggggtggtgttcctgcacgtcacctacgtgccggctcaggagaagaacttcaccacagctcccgcaatctgccacgacgggaaggcccacttcccccgggaaggggtcttcgtgtcgaacggcacccactggttcgtcacgcagcgcaacttctacgagccacagatcatcaccactgacaacaccttcgtcagtgggaactgcgacgtggtcatcgggatcgtcaacaacacggtgtacgatcccctgcagcccgagctggatagcttcaaggaggagctggacaagtacttcaagaaccacacttccccggatgtggacctcggggacatcagcggaatcaacgcctccgtggtcaacatccagaaggagatcgacaggctcaacgaggtggcaaagaacctcaacgagagcctgatcgatctccaggagctggggaagtatgagcagtacatcaagtggccctggtacatctggctcgggttcatcgcagggttgatcgccatcgtgatggtgacgatcatgttgtgctgcatgacgagctgctgcagctgcctgaagggctgctgcagctgcgggagctgctgtaagttcgacgaggacgattccgagccggtgctgaagggcgtgaagctgcactacacctgataagccgccgctccagctttgcacgtttcgatcccaaaggccctttttagggccgacca

SEQ ID NO: 143 - RNA, 3906 nt, synthetic construct
  source 1..3906: mol_type = other RNA
agaagctgtctatcgggctccagcggtcatgttcgtgttcctggtgctgcttccgctggtcagcagccagtgcgtgaacctgaccacgcggacgcagctgccacccgcgtacaccaatagcttcactcggggggtctactacccggacaaggtcttccggagcagcgtgctgcacagcacgcaggacctcttcctgccgttcttctcgaacgtcacgtggttccacgtgatcagcgggacgaacggcacgaagaggttcgacaaccccgtgctcccgttcaatgacggggtgtatttcgccagcatcgagaagagtaacatcattcgggggtggatcttcggcactaccttggactccaagacgcagagcctgctcatcgtgaacaacgccaccaacgtggtgatcaaggtctgcgagttccagttctgcaacgaccccttcttggaccacaagaacaacaagagctggatggagtccgagttcagagtctacagcagcgccaacaattgcaccttcgaatacgtgagccagccgttcctgatggacctggaaggcaagcagggcaacttcaagaacttgcgcgagtttgtcttcaagaacatcgacggctacttcaagatctacagcaagcacacccccatcattgtgcgggagccggaggacctgccgcagggcttcagcgctctggagccgctggtggacctgcccatcggcatcaacatcacgcggttccagacgctgttggccctgcacaggtcctacctgactccgggagactccagctccgggtggacggccggggctgcagcctactatgtgggctacctgcagccccggaccttcttgttgaagtacaacgagaacggcacgatcacggacgccgtggattgtgccttggaccccctgagcgagaccaagtgtaccctgaagtccttcaccgtggagaaggggatctaccagacctccaacttccgggtccagccgactgagagcatcgtgcggtttcccaacattaccaacttgtgccccttcgatgaggtgttcaacgccacgcggttcgccagcgtgtacgcctggaacaggaagcgcatcagcaactgcgtggccgactactcagtgttgtacaacctcgccccgttcttcaccttcaagtgctacggggtgagccctacaaagctgaacgacctctgcttcaccaacgtgtacgccgacagctttgtgattcgcggcgacgaggtccggcagatcgccccagggcagaccggcaatatcgctgactacaactacaagctgcctgacgatttcaccgggtgcgtgatcgcctggaacagcaacaagctggacagcaaggtgtcagggaactacaattacctgtaccggttgttcaggaagagtaacctgaagccgttcgagcgtgacatcagcaccgagatctaccaggccggcaacaagccctgcaacggggtggcgggattcaactgctactttccgttgcgctcctattcctttcggcccacctacggggtgggccaccagccctacagggtggtggtgctctccttcgagctgctccacgcaccggccacggtgtgtgggccgaagaagagtaccaacctggtgaagaataagtgcgtcaacttcaacttcaacgggctgaaaggaacaggagtgctgacggagagcaacaagaaattcctgccattccagcagttcgggcgcgacatcgctgacaccaccgacgctgtgcgggacccccagaccctggagatcctggacatcaccccttgcagcttcggcggcgtcagcgtgatcacgcccgggaccaacacatccaaccaggtggccgtgctgtaccagggcgtgaactgcaccgaggtgccggtggccatccacgccgatcagctgacgcccacctggcgggtgtactccacgggcagcaacgtcttccagacacgcgccggctgcttgatcggagccgagtacgtcaataacagctacgagtgcgacattcccatcggggccgggatctgcgccagctaccagacgcagaccaagtcccaccggcgcgctcggagcgtggcctcccagagcatcatcgcctacacgatgagcctgggggccgagaacagcgtcgcttatagcaacaacagcatcgctatccccaccaactttacaattagcgtgaccacggagatcttgcccgtcagcatgaccaagacctccgtggactgcaccatgtacatctgcggggatagcaccgagtgctccaacctgctcctgcagtacgggtccttctgcacgcagttgaagcgcgcattgaccggcatcgcagtggagcaggacaagaacacgcaggaggtgtttgctcaggtcaagcagatctacaagacgcccccgatcaagtacttcgggggcttcaacttcagccagatcctgcctgacccgagcaagccctccaagcgtagcttcatcgaggacctgctgttcaataaagtgacgctggcagacgccggcttcatcaagcagtacggcgactgtctgggggacatcgctgcccgggacctcatctgtgcccagaagttcaagggcctcacggtcctgccgcccctgctcacagatgagatgatcgcccagtacacgagcgccctgctcgctgggaccatcaccagcgggtggacgttcggcgcgggcgctgcattacagatccccttcgcgatgcagatggcctacagatttaacggtatcggcgtcacgcagaacgtgctgtacgagaaccagaagctgatcgccaaccagttcaacagcgccatcgggaagatccaggacagcttgagcagcaccgcctctgccctggggaagctgcaggacgtcgtgaatcacaatgcccaggccttgaacacgttggtgaagcagctctcatcgaagttcggcgccatcagcagcgtgctgaacgacatcttcagtcggctggaccccccggaggcggaggtccagatcgaccgcctgatcacggggaggctgcagagcttgcagacgtacgtgactcagcagctcatcagggctgctgagatccgggcgtctgccaacctggctgccaccaagatgtccgaatgcgtcttggggcagtccaagcgggtggacttctgcgggaagggctaccacctgatgtccttcccgcagagcgcaccccacggggtggtgttcctgcacgtcacctacgtgccggctcaggagaagaacttcaccacagctcccgcaatctgccacgacgggaaggcccacttcccccgggaaggggtcttcgtgtcgaacggcacccactggttcgtcacgcagcgcaacttctacgagccacagatcatcaccactgacaacaccttcgtcagtgggaactgcgacgtggtcatcgggatcgtcaacaacacggtgtacgatcccctgcagcccgagctggatagcttcaaggaggagctggacaagtacttcaagaaccacacttccccggatgtggacctcggggacatcagcggaatcaacgcctccgtggtcaacatccagaaggagatcgacaggctcaacgaggtggcaaagaacctcaacgagagcctgatcgatctccaggagctggggaagtatgagcagtacatcaagtggccctggtacatctggctcgggttcatcgcagggttgatcgccatcgtgatggtgacgatcatgttgtgctgcatgacgagctgctgcagctgcctgaagggctgctgcagctgcgggagctgctgtaagttcgacgaggacgattccgagccggtgctgaagggcgtgaagctgcactacacctgataatctagagccgccgctccagctttgcacgtttcgatcccaaaggccctttttagggccgacca

SEQ ID NO: 144 - RNA, 3909 nt, synthetic construct
  source 1..3909: mol_type = other RNA
aggagaagctgtctatcgggctccagcggtcatgttcgtgttcctggtgctgcttccgctggtcagcagccagtgcgtgaacctgaccacgcggacgcagctgccacccgcgtacaccaatagcttcactcggggggtctactacccggacaaggtcttccggagcagcgtgctgcacagcacgcaggacctcttcctgccgttcttctcgaacgtcacgtggttccacgtgatcagcgggacgaacggcacgaagaggttcgacaaccccgtgctcccgttcaatgacggggtgtatttcgccagcatcgagaagagtaacatcattcgggggtggatcttcggcactaccttggactccaagacgcagagcctgctcatcgtgaacaacgccaccaacgtggtgatcaaggtctgcgagttccagttctgcaacgaccccttcttggaccacaagaacaacaagagctggatggagtccgagttcagagtctacagcagcgccaacaattgcaccttcgaatacgtgagccagccgttcctgatggacctggaaggcaagcagggcaacttcaagaacttgcgcgagtttgtcttcaagaacatcgacggctacttcaagatctacagcaagcacacccccatcattgtgcgggagccggaggacctgccgcagggcttcagcgctctggagccgctggtggacctgcccatcggcatcaacatcacgcggttccagacgctgttggccctgcacaggtcctacctgactccgggagactccagctccgggtggacggccggggctgcagcctactatgtgggctacctgcagccccggaccttcttgttgaagtacaacgagaacggcacgatcacggacgccgtggattgtgccttggaccccctgagcgagaccaagtgtaccctgaagtccttcaccgtggagaaggggatctaccagacctccaacttccgggtccagccgactgagagcatcgtgcggtttcccaacattaccaacttgtgccccttcgatgaggtgttcaacgccacgcggttcgccagcgtgtacgcctggaacaggaagcgcatcagcaactgcgtggccgactactcagtgttgtacaacctcgccccgttcttcaccttcaagtgctacggggtgagccctacaaagctgaacgacctctgcttcaccaacgtgtacgccgacagctttgtgattcgcggcgacgaggtccggcagatcgccccagggcagaccggcaatatcgctgactacaactacaagctgcctgacgatttcaccgggtgcgtgatcgcctggaacagcaacaagctggacagcaaggtgtcagggaactacaattacctgtaccggttgttcaggaagagtaacctgaagccgttcgagcgtgacatcagcaccgagatctaccaggccggcaacaagccctgcaacggggtggcgggattcaactgctactttccgttgcgctcctattcctttcggcccacctacggggtgggccaccagccctacagggtggtggtgctctccttcgagctgctccacgcaccggccacggtgtgtgggccgaagaagagtaccaacctggtgaagaataagtgcgtcaacttcaacttcaacgggctgaaaggaacaggagtgctgacggagagcaacaagaaattcctgccattccagcagttcgggcgcgacatcgctgacaccaccgacgctgtgcgggacccccagaccctggagatcctggacatcaccccttgcagcttcggcggcgtcagcgtgatcacgcccgggaccaacacatccaaccaggtggccgtgctgtaccagggcgtgaactgcaccgaggtgccggtggccatccacgccgatcagctgacgcccacctggcgggtgtactccacgggcagcaacgtcttccagacacgcgccggctgcttgatcggagccgagtacgtcaataacagctacgagtgcgacattcccatcggggccgggatctgcgccagctaccagacgcagaccaagtcccaccggcgcgctcggagcgtggcctcccagagcatcatcgcctacacgatgagcctgggggccgagaacagcgtcgcttatagcaacaacagcatcgctatccccaccaactttacaattagcgtgaccacggagatcttgcccgtcagcatgaccaagacctccgtggactgcaccatgtacatctgcggggatagcaccgagtgctccaacctgctcctgcagtacgggtccttctgcacgcagttgaagcgcgcattgaccggcatcgcagtggagcaggacaagaacacgcaggaggtgtttgctcaggtcaagcagatctacaagacgcccccgatcaagtacttcgggggcttcaacttcagccagatcctgcctgacccgagcaagccctccaagcgtagcttcatcgaggacctgctgttcaataaagtgacgctggcagacgccggcttcatcaagcagtacggcgactgtctgggggacatcgctgcccgggacctcatctgtgcccagaagttcaagggcctcacggtcctgccgcccctgctcacagatgagatgatcgcccagtacacgagcgccctgctcgctgggaccatcaccagcgggtggacgttcggcgcgggcgctgcattacagatccccttcgcgatgcagatggcctacagatttaacggtatcggcgtcacgcagaacgtgctgtacgagaaccagaagctgatcgccaaccagttcaacagcgccatcgggaagatccaggacagcttgagcagcaccgcctctgccctggggaagctgcaggacgtcgtgaatcacaatgcccaggccttgaacacgttggtgaagcagctctcatcgaagttcggcgccatcagcagcgtgctgaacgacatcttcagtcggctggaccccccggaggcggaggtccagatcgaccgcctgatcacggggaggctgcagagcttgcagacgtacgtgactcagcagctcatcagggctgctgagatccgggcgtctgccaacctggctgccaccaagatgtccgaatgcgtcttggggcagtccaagcgggtggacttctgcgggaagggctaccacctgatgtccttcccgcagagcgcaccccacggggtggtgttcctgcacgtcacctacgtgccggctcaggagaagaacttcaccacagctcccgcaatctgccacgacgggaaggcccacttcccccgggaaggggtcttcgtgtcgaacggcacccactggttcgtcacgcagcgcaacttctacgagccacagatcatcaccactgacaacaccttcgtcagtgggaactgcgacgtggtcatcgggatcgtcaacaacacggtgtacgatcccctgcagcccgagctggatagcttcaaggaggagctggacaagtacttcaagaaccacacttccccggatgtggacctcggggacatcagcggaatcaacgcctccgtggtcaacatccagaaggagatcgacaggctcaacgaggtggcaaagaacctcaacgagagcctgatcgatctccaggagctggggaagtatgagcagtacatcaagtggccctggtacatctggctcgggttcatcgcagggttgatcgccatcgtgatggtgacgatcatgttgtgctgcatgacgagctgctgcagctgcctgaagggctgctgcagctgcgggagctgctgtaagttcgacgaggacgattccgagccggtgctgaagggcgtgaagctgcactacacctgataatctagagccgccgctccagctttgcacgtttcgatcccaaaggccctttttagggccgacca

SEQ ID NO: 145 - RNA, 4045 nt, synthetic construct
  source 1..4045: mol_type = other RNA
aggagaagctgtctatcgggctccagcggtcatgttcgtgttcctggtgctgcttccgctggtcagcagccagtgcgtgaacctgaccacgcggacgcagctgccacccgcgtacaccaatagcttcactcggggggtctactacccggacaaggtcttccggagcagcgtgctgcacagcacgcaggacctcttcctgccgttcttctcgaacgtcacgtggttccacgtgatcagcgggacgaacggcacgaagaggttcgacaaccccgtgctcccgttcaatgacggggtgtatttcgccagcatcgagaagagtaacatcattcgggggtggatcttcggcactaccttggactccaagacgcagagcctgctcatcgtgaacaacgccaccaacgtggtgatcaaggtctgcgagttccagttctgcaacgaccccttcttggaccacaagaacaacaagagctggatggagtccgagttcagagtctacagcagcgccaacaattgcaccttcgaatacgtgagccagccgttcctgatggacctggaaggcaagcagggcaacttcaagaacttgcgcgagtttgtcttcaagaacatcgacggctacttcaagatctacagcaagcacacccccatcattgtgcgggagccggaggacctgccgcagggcttcagcgctctggagccgctggtggacctgcccatcggcatcaacatcacgcggttccagacgctgttggccctgcacaggtcctacctgactccgggagactccagctccgggtggacggccggggctgcagcctactatgtgggctacctgcagccccggaccttcttgttgaagtacaacgagaacggcacgatcacggacgccgtggattgtgccttggaccccctgagcgagaccaagtgtaccctgaagtccttcaccgtggagaaggggatctaccagacctccaacttccgggtccagccgactgagagcatcgtgcggtttcccaacattaccaacttgtgccccttcgatgaggtgttcaacgccacgcggttcgccagcgtgtacgcctggaacaggaagcgcatcagcaactgcgtggccgactactcagtgttgtacaacctcgccccgttcttcaccttcaagtgctacggggtgagccctacaaagctgaacgacctctgcttcaccaacgtgtacgccgacagctttgtgattcgcggcgacgaggtccggcagatcgccccagggcagaccggcaatatcgctgactacaactacaagctgcctgacgatttcaccgggtgcgtgatcgcctggaacagcaacaagctggacagcaaggtgtcagggaactacaattacctgtaccggttgttcaggaagagtaacctgaagccgttcgagcgtgacatcagcaccgagatctaccaggccggcaacaagccctgcaacggggtggcgggattcaactgctactttccgttgcgctcctattcctttcggcccacctacggggtgggccaccagccctacagggtggtggtgctctccttcgagctgctccacgcaccggccacggtgtgtgggccgaagaagagtaccaacctggtgaagaataagtgcgtcaacttcaacttcaacgggctgaaaggaacaggagtgctgacggagagcaacaagaaattcctgccattccagcagttcgggcgcgacatcgctgacaccaccgacgctgtgcgggacccccagaccctggagatcctggacatcaccccttgcagcttcggcggcgtcagcgtgatcacgcccgggaccaacacatccaaccaggtggccgtgctgtaccagggcgtgaactgcaccgaggtgccggtggccatccacgccgatcagctgacgcccacctggcgggtgtactccacgggcagcaacgtcttccagacacgcgccggctgcttgatcggagccgagtacgtcaataacagctacgagtgcgacattcccatcggggccgggatctgcgccagctaccagacgcagaccaagtcccaccggcgcgctcggagcgtggcctcccagagcatcatcgcctacacgatgagcctgggggccgagaacagcgtcgcttatagcaacaacagcatcgctatccccaccaactttacaattagcgtgaccacggagatcttgcccgtcagcatgaccaagacctccgtggactgcaccatgtacatctgcggggatagcaccgagtgctccaacctgctcctgcagtacgggtccttctgcacgcagttgaagcgcgcattgaccggcatcgcagtggagcaggacaagaacacgcaggaggtgtttgctcaggtcaagcagatctacaagacgcccccgatcaagtacttcgggggcttcaacttcagccagatcctgcctgacccgagcaagccctccaagcgtagcttcatcgaggacctgctgttcaataaagtgacgctggcagacgccggcttcatcaagcagtacggcgactgtctgggggacatcgctgcccgggacctcatctgtgcccagaagttcaagggcctcacggtcctgccgcccctgctcacagatgagatgatcgcccagtacacgagcgccctgctcgctgggaccatcaccagcgggtggacgttcggcgcgggcgctgcattacagatccccttcgcgatgcagatggcctacagatttaacggtatcggcgtcacgcagaacgtgctgtacgagaaccagaagctgatcgccaaccagttcaacagcgccatcgggaagatccaggacagcttgagcagcaccgcctctgccctggggaagctgcaggacgtcgtgaatcacaatgcccaggccttgaacacgttggtgaagcagctctcatcgaagttcggcgccatcagcagcgtgctgaacgacatcttcagtcggctggaccccccggaggcggaggtccagatcgaccgcctgatcacggggaggctgcagagcttgcagacgtacgtgactcagcagctcatcagggctgctgagatccgggcgtctgccaacctggctgccaccaagatgtccgaatgcgtcttggggcagtccaagcgggtggacttctgcgggaagggctaccacctgatgtccttcccgcagagcgcaccccacggggtggtgttcctgcacgtcacctacgtgccggctcaggagaagaacttcaccacagctcccgcaatctgccacgacgggaaggcccacttcccccgggaaggggtcttcgtgtcgaacggcacccactggttcgtcacgcagcgcaacttctacgagccacagatcatcaccactgacaacaccttcgtcagtgggaactgcgacgtggtcatcgggatcgtcaacaacacggtgtacgatcccctgcagcccgagctggatagcttcaaggaggagctggacaagtacttcaagaaccacacttccccggatgtggacctcggggacatcagcggaatcaacgcctccgtggtcaacatccagaaggagatcgacaggctcaacgaggtggcaaagaacctcaacgagagcctgatcgatctccaggagctggggaagtatgagcagtacatcaagtggccctggtacatctggctcgggttcatcgcagggttgatcgccatcgtgatggtgacgatcatgttgtgctgcatgacgagctgctgcagctgcctgaagggctgctgcagctgcgggagctgctgtaagttcgacgaggacgattccgagccggtgctgaagggcgtgaagctgcactacacctgataatctagagccgccgctccagctttgcacgtttcgatcccaaaggccctttttagggccgaccattcattgcaaaaaaaaaaaaaaaaaaaaaaaaaaaaaagcatatgactaaaaaaaaaaaaaaaaaaaaaaaaaaaaaaaaaaaaaaaaaaaaaaaaaaaaaaaaaaaaaaaaaaaaaaaaaaaaaaaaaaaaaaaa

SEQ ID NO: 146 - RNA, 3900 nt, synthetic construct
  source 1..3900: mol_type = other RNA
agaagctgtctatcgggctccagcggtcatgttcgtgttcctggtgctgctgccgctggtcagttcgcagtgcgtgaacctgaccacgcggacgcagctgccacccgcgtacactaacagtttcactcggggggtctactacccggataaggtcttccggagtagcgtgctgcacagcacgcaggacctcttcctcccgttcttctcgaatgtcacgtggttccacgtgatcagcgggacgaacgggacgaagaggttcgacaaccccgtgctcccgttcaatgatggggtgtacttcgccagcatcgagaagagtaacatcattcgagggtggatctttggcactaccctggactccaagactcagagtctgctcatagtcaacaatgccaccaacgtggtgatcaaggtctgtgagttccagttctgcaacgatccattcctggatcacaagaataacaagagctggatggagtctgagttcagagtctatagtagtgccaacaactgcaccttcgagtatgtgagccagccgttcctgatggaccttgaaggcaagcagggcaacttcaagaacctgcgcgagtttgtcttcaagaacatcgacggctacttcaagatatacagcaagcacacccccatcattgtgcgggagccggaggacctgccgcagggcttcagcgctctggagccgctggtggatttgccgatcggcatcaacatcacgcggttccagacgctgttggccctgcacaggtcctacctgactccgggggactccagctccgggtggacggccggggctgcagcctactacgtgggctacttgcagccccggaccttcttgttgaagtacaacgagaacggcacaatcacggacgccgtggattgtgccctggaccccctgagtgagaccaagtgtaccctgaagtccttcaccgtggagaaggggatctatcagacctccaacttccgggtccagccgactgagagcatcgtgcggttccccaacatcacgaacttgtgcccctttgatgaggtgttcaacgccacgcggttcgcgagcgtgtacgcctggaacaggaagcgcatcagcaactgcgtggcagattattcagtgttgtacaacctcgccccgttcttcaccttcaagtgctacggggtgagccccacaaaactgaatgatctctgcttcaccaacgtgtacgccgatagctttgtgattcgcggcgacgaagtccggcagatcgccccagggcagaccggcaacatcgccgactacaactacaagctgcctgacgattttaccggttgcgtgattgcctggaacagcaacaagctggactcgaaggtgtcagggaactacaactacctgtaccggttgttcagaaagagcaacctgaagccgttcgagcgtgacatcagcaccgagatctaccaggccggcaacaagccctgcaacggagtggcaggcttcaactgttactttccgttgcgctcctactcctttcggcccacctacggggtgggccaccagccctatagggtggtggtgctctccttcgagctgctccacgcgccggccacggtgtgtgggccgaagaagagtaccaacctggtgaagaacaagtgcgtcaacttcaacttcaacgggctgaagggaacaggggtgctgacggagagtaacaagaagttcctgccattccagcagttcgggcgtgacatcgctgacaccaccgacgctgtgcgggatccccagaccctcgagatcctggacatcaccccgtgcagcttcggtggtgtcagcgtgatcacgcccgggaccaacacctccaaccaggtggccgtgctgtaccagggcgtgaattgcaccgaggtgccggtggcaattcacgccgaccagctgacgcccacctggcgggtgtactccacgggcagcaacgtcttccagacccgcgccggctgcttgatcggggccgagtacgtgaacaacagctacgagtgcgatatcccgatcggggccgggatctgcgcctcctaccagacgcagaccaagtcccatcggcgcgctcgtagcgtggcctcccagagcatcatcgcctacacgatgagcctgggggccgagaactccgtcgcgtacagcaacaactccatcgctatccccacaaattttacaattagcgtgaccacggagatcttgcccgtcagcatgaccaagacctccgtggactgcaccatgtacatttgtggggatagcaccgagtgttccaacctgctcctgcagtacgggtccttctgcacgcagctgaagcgtgccctgaccggtattgcagtggagcaggacaagaacactcaggaggtgtttgctcaggtcaagcagatctacaagacgcccccgattaaatacttcgggggcttcaactttagccagatcctgcccgacccgagcaagccctccaagcggagcttcattgaggacctgctctttaacaaggtgacgctggcagacgccggcttcatcaagcagtacggcgactgtctgggggacatcgctgcccgggacctcatctgtgcccagaagttcaagggcctcacggtcctgccgcctctgctcacagatgagatgatcgcccagtacacgagcgctctgctcgctgggaccatcaccagcgggtggacgttcggtgctggggcggcattacagatcccctttgccatgcagatggcctacagattcaacgggattggtgtcacgcagaacgtgctgtacgagaaccagaagctgattgccaaccagttcaacagcgcaatcggtaagatccaggacagcttgagcagcaccgcctctgccctggggaagctgcaggacgtcgtgaatcacaacgcccaggccctgaacacgttggtgaagcagctctcatcaaagttcggcgcaatcagcagcgtgctgaacgacatcttcagtcggctggaccccccggaggctgaggtccagatagatcgcctcatcacgggaaggcttcagagtttgcagacgtacgtgactcagcagctcatccgggctgctgagatccgtgcgtctgcaaacctggctgccaccaagatgagcgagtgcgtcttggggcagtcaaagcgggtggacttctgcgggaagggctaccacctgatgtccttcccgcagagcgcaccccacggggtggtgttccttcacgtcacctacgtgccggctcaggagaagaacttcacaacagctcccgccatctgccacgacgggaaggcccacttcccccgggaaggggtcttcgtgtcgaatggcacccactggttcgtcacgcagcgcaacttctatgagccacagatcatcaccactgacaacaccttcgtcagtgggaactgcgatgtggtcatagggatcgtcaacaacacggtgtacgatcccctgcagcccgagctggatagcttcaaggaggagctggacaagtacttcaagaatcatacttccccggatgttgacctcggggacatcagcggcatcaacgcctccgtggtcaacatccagaaggagatcgacaggctcaacgaggtggcaaaaaacctcaacgagagcctgatcgatctccaggagctggggaagtatgagcagtacatcaagtggccttggtacatctggctcgggttcatcgcagggctgatcgccatcgtgatggtgacgatcatgttgtgctgcatgacgagctgctgcagctgcctgaagggctgctgcagctgcgggagctgttgcaagttcgacgaggacgactccgagccggtgctgaagggcgtgaagctgcactacacctgataagccgccgctccagctttgcacgtttcgatcccaaaggccctttttagggccgacca

SEQ ID NO: 147 - RNA, 3906 nt, synthetic construct
  source 1..3906: mol_type = other RNA
agaagctgtctatcgggctccagcggtcatgttcgtgttcctggtgctgctgccgctggtcagttcgcagtgcgtgaacctgaccacgcggacgcagctgccacccgcgtacactaacagtttcactcggggggtctactacccggataaggtcttccggagtagcgtgctgcacagcacgcaggacctcttcctcccgttcttctcgaatgtcacgtggttccacgtgatcagcgggacgaacgggacgaagaggttcgacaaccccgtgctcccgttcaatgatggggtgtacttcgccagcatcgagaagagtaacatcattcgagggtggatctttggcactaccctggactccaagactcagagtctgctcatagtcaacaatgccaccaacgtggtgatcaaggtctgtgagttccagttctgcaacgatccattcctggatcacaagaataacaagagctggatggagtctgagttcagagtctatagtagtgccaacaactgcaccttcgagtatgtgagccagccgttcctgatggaccttgaaggcaagcagggcaacttcaagaacctgcgcgagtttgtcttcaagaacatcgacggctacttcaagatatacagcaagcacacccccatcattgtgcgggagccggaggacctgccgcagggcttcagcgctctggagccgctggtggatttgccgatcggcatcaacatcacgcggttccagacgctgttggccctgcacaggtcctacctgactccgggggactccagctccgggtggacggccggggctgcagcctactacgtgggctacttgcagccccggaccttcttgttgaagtacaacgagaacggcacaatcacggacgccgtggattgtgccctggaccccctgagtgagaccaagtgtaccctgaagtccttcaccgtggagaaggggatctatcagacctccaacttccgggtccagccgactgagagcatcgtgcggttccccaacatcacgaacttgtgcccctttgatgaggtgttcaacgccacgcggttcgcgagcgtgtacgcctggaacaggaagcgcatcagcaactgcgtggcagattattcagtgttgtacaacctcgccccgttcttcaccttcaagtgctacggggtgagccccacaaaactgaatgatctctgcttcaccaacgtgtacgccgatagctttgtgattcgcggcgacgaagtccggcagatcgccccagggcagaccggcaacatcgccgactacaactacaagctgcctgacgattttaccggttgcgtgattgcctggaacagcaacaagctggactcgaaggtgtcagggaactacaactacctgtaccggttgttcagaaagagcaacctgaagccgttcgagcgtgacatcagcaccgagatctaccaggccggcaacaagccctgcaacggagtggcaggcttcaactgttactttccgttgcgctcctactcctttcggcccacctacggggtgggccaccagccctatagggtggtggtgctctccttcgagctgctccacgcgccggccacggtgtgtgggccgaagaagagtaccaacctggtgaagaacaagtgcgtcaacttcaacttcaacgggctgaagggaacaggggtgctgacggagagtaacaagaagttcctgccattccagcagttcgggcgtgacatcgctgacaccaccgacgctgtgcgggatccccagaccctcgagatcctggacatcaccccgtgcagcttcggtggtgtcagcgtgatcacgcccgggaccaacacctccaaccaggtggccgtgctgtaccagggcgtgaattgcaccgaggtgccggtggcaattcacgccgaccagctgacgcccacctggcgggtgtactccacgggcagcaacgtcttccagacccgcgccggctgcttgatcggggccgagtacgtgaacaacagctacgagtgcgatatcccgatcggggccgggatctgcgcctcctaccagacgcagaccaagtcccatcggcgcgctcgtagcgtggcctcccagagcatcatcgcctacacgatgagcctgggggccgagaactccgtcgcgtacagcaacaactccatcgctatccccacaaattttacaattagcgtgaccacggagatcttgcccgtcagcatgaccaagacctccgtggactgcaccatgtacatttgtggggatagcaccgagtgttccaacctgctcctgcagtacgggtccttctgcacgcagctgaagcgtgccctgaccggtattgcagtggagcaggacaagaacactcaggaggtgtttgctcaggtcaagcagatctacaagacgcccccgattaaatacttcgggggcttcaactttagccagatcctgcccgacccgagcaagccctccaagcggagcttcattgaggacctgctctttaacaaggtgacgctggcagacgccggcttcatcaagcagtacggcgactgtctgggggacatcgctgcccgggacctcatctgtgcccagaagttcaagggcctcacggtcctgccgcctctgctcacagatgagatgatcgcccagtacacgagcgctctgctcgctgggaccatcaccagcgggtggacgttcggtgctggggcggcattacagatcccctttgccatgcagatggcctacagattcaacgggattggtgtcacgcagaacgtgctgtacgagaaccagaagctgattgccaaccagttcaacagcgcaatcggtaagatccaggacagcttgagcagcaccgcctctgccctggggaagctgcaggacgtcgtgaatcacaacgcccaggccctgaacacgttggtgaagcagctctcatcaaagttcggcgcaatcagcagcgtgctgaacgacatcttcagtcggctggaccccccggaggctgaggtccagatagatcgcctcatcacgggaaggcttcagagtttgcagacgtacgtgactcagcagctcatccgggctgctgagatccgtgcgtctgcaaacctggctgccaccaagatgagcgagtgcgtcttggggcagtcaaagcgggtggacttctgcgggaagggctaccacctgatgtccttcccgcagagcgcaccccacggggtggtgttccttcacgtcacctacgtgccggctcaggagaagaacttcacaacagctcccgccatctgccacgacgggaaggcccacttcccccgggaaggggtcttcgtgtcgaatggcacccactggttcgtcacgcagcgcaacttctatgagccacagatcatcaccactgacaacaccttcgtcagtgggaactgcgatgtggtcatagggatcgtcaacaacacggtgtacgatcccctgcagcccgagctggatagcttcaaggaggagctggacaagtacttcaagaatcatacttccccggatgttgacctcggggacatcagcggcatcaacgcctccgtggtcaacatccagaaggagatcgacaggctcaacgaggtggcaaaaaacctcaacgagagcctgatcgatctccaggagctggggaagtatgagcagtacatcaagtggccttggtacatctggctcgggttcatcgcagggctgatcgccatcgtgatggtgacgatcatgttgtgctgcatgacgagctgctgcagctgcctgaagggctgctgcagctgcgggagctgttgcaagttcgacgaggacgactccgagccggtgctgaagggcgtgaagctgcactacacctgataatctagagccgccgctccagctttgcacgtttcgatcccaaaggccctttttagggccgacca

SEQ ID NO: 148 - RNA, 3909 nt, synthetic construct
  source 1..3909: mol_type = other RNA
aggagaagctgtctatcgggctccagcggtcatgttcgtgttcctggtgctgctgccgctggtcagttcgcagtgcgtgaacctgaccacgcggacgcagctgccacccgcgtacactaacagtttcactcggggggtctactacccggataaggtcttccggagtagcgtgctgcacagcacgcaggacctcttcctcccgttcttctcgaatgtcacgtggttccacgtgatcagcgggacgaacgggacgaagaggttcgacaaccccgtgctcccgttcaatgatggggtgtacttcgccagcatcgagaagagtaacatcattcgagggtggatctttggcactaccctggactccaagactcagagtctgctcatagtcaacaatgccaccaacgtggtgatcaaggtctgtgagttccagttctgcaacgatccattcctggatcacaagaataacaagagctggatggagtctgagttcagagtctatagtagtgccaacaactgcaccttcgagtatgtgagccagccgttcctgatggaccttgaaggcaagcagggcaacttcaagaacctgcgcgagtttgtcttcaagaacatcgacggctacttcaagatatacagcaagcacacccccatcattgtgcgggagccggaggacctgccgcagggcttcagcgctctggagccgctggtggatttgccgatcggcatcaacatcacgcggttccagacgctgttggccctgcacaggtcctacctgactccgggggactccagctccgggtggacggccggggctgcagcctactacgtgggctacttgcagccccggaccttcttgttgaagtacaacgagaacggcacaatcacggacgccgtggattgtgccctggaccccctgagtgagaccaagtgtaccctgaagtccttcaccgtggagaaggggatctatcagacctccaacttccgggtccagccgactgagagcatcgtgcggttccccaacatcacgaacttgtgcccctttgatgaggtgttcaacgccacgcggttcgcgagcgtgtacgcctggaacaggaagcgcatcagcaactgcgtggcagattattcagtgttgtacaacctcgccccgttcttcaccttcaagtgctacggggtgagccccacaaaactgaatgatctctgcttcaccaacgtgtacgccgatagctttgtgattcgcggcgacgaagtccggcagatcgccccagggcagaccggcaacatcgccgactacaactacaagctgcctgacgattttaccggttgcgtgattgcctggaacagcaacaagctggactcgaaggtgtcagggaactacaactacctgtaccggttgttcagaaagagcaacctgaagccgttcgagcgtgacatcagcaccgagatctaccaggccggcaacaagccctgcaacggagtggcaggcttcaactgttactttccgttgcgctcctactcctttcggcccacctacggggtgggccaccagccctatagggtggtggtgctctccttcgagctgctccacgcgccggccacggtgtgtgggccgaagaagagtaccaacctggtgaagaacaagtgcgtcaacttcaacttcaacgggctgaagggaacaggggtgctgacggagagtaacaagaagttcctgccattccagcagttcgggcgtgacatcgctgacaccaccgacgctgtgcgggatccccagaccctcgagatcctggacatcaccccgtgcagcttcggtggtgtcagcgtgatcacgcccgggaccaacacctccaaccaggtggccgtgctgtaccagggcgtgaattgcaccgaggtgccggtggcaattcacgccgaccagctgacgcccacctggcgggtgtactccacgggcagcaacgtcttccagacccgcgccggctgcttgatcggggccgagtacgtgaacaacagctacgagtgcgatatcccgatcggggccgggatctgcgcctcctaccagacgcagaccaagtcccatcggcgcgctcgtagcgtggcctcccagagcatcatcgcctacacgatgagcctgggggccgagaactccgtcgcgtacagcaacaactccatcgctatccccacaaattttacaattagcgtgaccacggagatcttgcccgtcagcatgaccaagacctccgtggactgcaccatgtacatttgtggggatagcaccgagtgttccaacctgctcctgcagtacgggtccttctgcacgcagctgaagcgtgccctgaccggtattgcagtggagcaggacaagaacactcaggaggtgtttgctcaggtcaagcagatctacaagacgcccccgattaaatacttcgggggcttcaactttagccagatcctgcccgacccgagcaagccctccaagcggagcttcattgaggacctgctctttaacaaggtgacgctggcagacgccggcttcatcaagcagtacggcgactgtctgggggacatcgctgcccgggacctcatctgtgcccagaagttcaagggcctcacggtcctgccgcctctgctcacagatgagatgatcgcccagtacacgagcgctctgctcgctgggaccatcaccagcgggtggacgttcggtgctggggcggcattacagatcccctttgccatgcagatggcctacagattcaacgggattggtgtcacgcagaacgtgctgtacgagaaccagaagctgattgccaaccagttcaacagcgcaatcggtaagatccaggacagcttgagcagcaccgcctctgccctggggaagctgcaggacgtcgtgaatcacaacgcccaggccctgaacacgttggtgaagcagctctcatcaaagttcggcgcaatcagcagcgtgctgaacgacatcttcagtcggctggaccccccggaggctgaggtccagatagatcgcctcatcacgggaaggcttcagagtttgcagacgtacgtgactcagcagctcatccgggctgctgagatccgtgcgtctgcaaacctggctgccaccaagatgagcgagtgcgtcttggggcagtcaaagcgggtggacttctgcgggaagggctaccacctgatgtccttcccgcagagcgcaccccacggggtggtgttccttcacgtcacctacgtgccggctcaggagaagaacttcacaacagctcccgccatctgccacgacgggaaggcccacttcccccgggaaggggtcttcgtgtcgaatggcacccactggttcgtcacgcagcgcaacttctatgagccacagatcatcaccactgacaacaccttcgtcagtgggaactgcgatgtggtcatagggatcgtcaacaacacggtgtacgatcccctgcagcccgagctggatagcttcaaggaggagctggacaagtacttcaagaatcatacttccccggatgttgacctcggggacatcagcggcatcaacgcctccgtggtcaacatccagaaggagatcgacaggctcaacgaggtggcaaaaaacctcaacgagagcctgatcgatctccaggagctggggaagtatgagcagtacatcaagtggccttggtacatctggctcgggttcatcgcagggctgatcgccatcgtgatggtgacgatcatgttgtgctgcatgacgagctgctgcagctgcctgaagggctgctgcagctgcgggagctgttgcaagttcgacgaggacgactccgagccggtgctgaagggcgtgaagctgcactacacctgataatctagagccgccgctccagctttgcacgtttcgatcccaaaggccctttttagggccgacca

SEQ ID NO: 149 - RNA, 4045 nt, synthetic construct
  source 1..4045: mol_type = other RNA
aggagaagctgtctatcgggctccagcggtcatgttcgtgttcctggtgctgctgccgctggtcagttcgcagtgcgtgaacctgaccacgcggacgcagctgccacccgcgtacactaacagtttcactcggggggtctactacccggataaggtcttccggagtagcgtgctgcacagcacgcaggacctcttcctcccgttcttctcgaatgtcacgtggttccacgtgatcagcgggacgaacgggacgaagaggttcgacaaccccgtgctcccgttcaatgatggggtgtacttcgccagcatcgagaagagtaacatcattcgagggtggatctttggcactaccctggactccaagactcagagtctgctcatagtcaacaatgccaccaacgtggtgatcaaggtctgtgagttccagttctgcaacgatccattcctggatcacaagaataacaagagctggatggagtctgagttcagagtctatagtagtgccaacaactgcaccttcgagtatgtgagccagccgttcctgatggaccttgaaggcaagcagggcaacttcaagaacctgcgcgagtttgtcttcaagaacatcgacggctacttcaagatatacagcaagcacacccccatcattgtgcgggagccggaggacctgccgcagggcttcagcgctctggagccgctggtggatttgccgatcggcatcaacatcacgcggttccagacgctgttggccctgcacaggtcctacctgactccgggggactccagctccgggtggacggccggggctgcagcctactacgtgggctacttgcagccccggaccttcttgttgaagtacaacgagaacggcacaatcacggacgccgtggattgtgccctggaccccctgagtgagaccaagtgtaccctgaagtccttcaccgtggagaaggggatctatcagacctccaacttccgggtccagccgactgagagcatcgtgcggttccccaacatcacgaacttgtgcccctttgatgaggtgttcaacgccacgcggttcgcgagcgtgtacgcctggaacaggaagcgcatcagcaactgcgtggcagattattcagtgttgtacaacctcgccccgttcttcaccttcaagtgctacggggtgagccccacaaaactgaatgatctctgcttcaccaacgtgtacgccgatagctttgtgattcgcggcgacgaagtccggcagatcgccccagggcagaccggcaacatcgccgactacaactacaagctgcctgacgattttaccggttgcgtgattgcctggaacagcaacaagctggactcgaaggtgtcagggaactacaactacctgtaccggttgttcagaaagagcaacctgaagccgttcgagcgtgacatcagcaccgagatctaccaggccggcaacaagccctgcaacggagtggcaggcttcaactgttactttccgttgcgctcctactcctttcggcccacctacggggtgggccaccagccctatagggtggtggtgctctccttcgagctgctccacgcgccggccacggtgtgtgggccgaagaagagtaccaacctggtgaagaacaagtgcgtcaacttcaacttcaacgggctgaagggaacaggggtgctgacggagagtaacaagaagttcctgccattccagcagttcgggcgtgacatcgctgacaccaccgacgctgtgcgggatccccagaccctcgagatcctggacatcaccccgtgcagcttcggtggtgtcagcgtgatcacgcccgggaccaacacctccaaccaggtggccgtgctgtaccagggcgtgaattgcaccgaggtgccggtggcaattcacgccgaccagctgacgcccacctggcgggtgtactccacgggcagcaacgtcttccagacccgcgccggctgcttgatcggggccgagtacgtgaacaacagctacgagtgcgatatcccgatcggggccgggatctgcgcctcctaccagacgcagaccaagtcccatcggcgcgctcgtagcgtggcctcccagagcatcatcgcctacacgatgagcctgggggccgagaactccgtcgcgtacagcaacaactccatcgctatccccacaaattttacaattagcgtgaccacggagatcttgcccgtcagcatgaccaagacctccgtggactgcaccatgtacatttgtggggatagcaccgagtgttccaacctgctcctgcagtacgggtccttctgcacgcagctgaagcgtgccctgaccggtattgcagtggagcaggacaagaacactcaggaggtgtttgctcaggtcaagcagatctacaagacgcccccgattaaatacttcgggggcttcaactttagccagatcctgcccgacccgagcaagccctccaagcggagcttcattgaggacctgctctttaacaaggtgacgctggcagacgccggcttcatcaagcagtacggcgactgtctgggggacatcgctgcccgggacctcatctgtgcccagaagttcaagggcctcacggtcctgccgcctctgctcacagatgagatgatcgcccagtacacgagcgctctgctcgctgggaccatcaccagcgggtggacgttcggtgctggggcggcattacagatcccctttgccatgcagatggcctacagattcaacgggattggtgtcacgcagaacgtgctgtacgagaaccagaagctgattgccaaccagttcaacagcgcaatcggtaagatccaggacagcttgagcagcaccgcctctgccctggggaagctgcaggacgtcgtgaatcacaacgcccaggccctgaacacgttggtgaagcagctctcatcaaagttcggcgcaatcagcagcgtgctgaacgacatcttcagtcggctggaccccccggaggctgaggtccagatagatcgcctcatcacgggaaggcttcagagtttgcagacgtacgtgactcagcagctcatccgggctgctgagatccgtgcgtctgcaaacctggctgccaccaagatgagcgagtgcgtcttggggcagtcaaagcgggtggacttctgcgggaagggctaccacctgatgtccttcccgcagagcgcaccccacggggtggtgttccttcacgtcacctacgtgccggctcaggagaagaacttcacaacagctcccgccatctgccacgacgggaaggcccacttcccccgggaaggggtcttcgtgtcgaatggcacccactggttcgtcacgcagcgcaacttctatgagccacagatcatcaccactgacaacaccttcgtcagtgggaactgcgatgtggtcatagggatcgtcaacaacacggtgtacgatcccctgcagcccgagctggatagcttcaaggaggagctggacaagtacttcaagaatcatacttccccggatgttgacctcggggacatcagcggcatcaacgcctccgtggtcaacatccagaaggagatcgacaggctcaacgaggtggcaaaaaacctcaacgagagcctgatcgatctccaggagctggggaagtatgagcagtacatcaagtggccttggtacatctggctcgggttcatcgcagggctgatcgccatcgtgatggtgacgatcatgttgtgctgcatgacgagctgctgcagctgcctgaagggctgctgcagctgcgggagctgttgcaagttcgacgaggacgactccgagccggtgctgaagggcgtgaagctgcactacacctgataatctagagccgccgctccagctttgcacgtttcgatcccaaaggccctttttagggccgaccattcattgcaaaaaaaaaaaaaaaaaaaaaaaaaaaaaagcatatgactaaaaaaaaaaaaaaaaaaaaaaaaaaaaaaaaaaaaaaaaaaaaaaaaaaaaaaaaaaaaaaaaaaaaaaaaaaaaaaaaaaaaaaaa

SEQ ID NO: 150 - RNA, 3900 nt, synthetic construct
  source 1..3900: mol_type = other RNA
agaagctgtctatcgggctccagcggtcatgttcgtgttcctggtgttgttgccgctggtgtcgagccagtgcgtcaacctgacgacacggacacagctgccccccgcgtacacgaactcgttcacgcggggggtgtactacccagacaaggtcttcaggagcagcgtgctgcacagcacgcaggacctcttcctcccgttcttctccaatgtcacgtggttccacgtgatatcggggacgaacgggacgaagaggttcgacaaccccgtgctcccgttcaatgacggggtgtacttcgcgtcgatcgagaagagtaacatcattcgagggtggatttttggcactaccctggactcgaagactcagagcctgctcatagtcaacaacgccaccaacgtggtgatcaaggtctgtgagttccagttctgcaacgacccgttcttggaccacaagaacaacaagagctggatggagtctgagtttcgagtctacagtagtgccaacaattgcaccttcgaatatgtgagccagccgttcctgatggacctggagggcaagcagggcaacttcaagaacttgcgcgagtttgtcttcaagaacatcgacggctacttcaagatctactcgaagcacaccccgatcattgtgcgggagccggaggacctgccgcagggcttcagcgctctggaaccgctggtggacttgcccatcggcatcaacatcacgcggttccagacgctgctggccctgcacaggtcctacctgactccgggagactcttcgtcggggtggaccgcgggtgcagccgcctactacgtgggctacctgcagccgcggacgttcttgttgaagtacaacgagaacggcacaatcaccgacgcggtggattgtgccctcgacccgctgagcgagaccaagtgcacactcaagagcttcacggtggagaaggggatctatcagacctccaacttccgggtccagccgactgagagcatcgttcggttcccgaacatcaccaacctgtgcccgtttgacgaggtgttcaacgccacgcggttcgcgtccgtgtacgcctggaaccggaaacggatctcgaactgcgtggcggactactcagtgttgtacaacctcgccccgttcttcaccttcaagtgctacggggtgagccccacaaagctgaacgacctctgcttcaccaacgtctacgcggatagcttcgtgatccgcggcgacgaggtgaggcagatcgcacctggtcagacgggcaacatcgccgactataattacaagctgcctgatgatttcacgggatgtgtcatcgcttggaacagcaacaagttggactccaaggtgagcgggaactataactacctgtaccgcttatttcggaagtccaacttgaagccgttcgagcgagacatatccacggagatctatcaggcaggcaataagccctgcaacggggtggcagggttcaattgttactttcccctgaggtcgtactctttccggcccacatacggggtggggcaccagccttacagggtggtggtgctatccttcgagttgctgcacgccccagccaccgtatgtgggccgaagaagagtacgaacctcgtgaagaacaagtgcgtcaacttcaacttcaacgggttgaaggggacgggcgtgctcacggagagtaacaagaaattcctgccattccagcagttcgggcgtgatatcgctgacaccaccgacgcggtgcgggatccccagaccctggagatcctggacatcacgccgtgcagcttcggtggtgtcagcgtgatcacgcccggcaccaacacctcgaaccaggtggcagtgctttaccagggtgtgaactgcactgaggtgcctgtggctatccacgccgatcagctgaccccaacgtggagggtgtactcgacagggagcaacgtcttccagacccgcgctggctgcctgattggcgctgagtacgtgaacaactcgtacgagtgcgacatccccattggggccggcatctgcgcgagttaccagacccagaccaagagccatcggagggcgagatcggtggcatcccagtcgatcatcgcctacacgatgagcctgggggccgagaacagcgtggcctacagcaacaacagcatcgctatccccacaaactttacaatcagtgtgaccaccgagatcttgcccgtcagcatgaccaagacctcggtggactgcactatgtacatctgtggggatagcaccgagtgttccaacctgctcctccagtacggctcgttctgcacgcaactgaagcgtgcattgacgggcatcgcggtggagcaggacaagaacactcaggaggtgtttgctcaggtcaagcagatctacaagacgcccccgatcaagtacttcgggggcttcaacttctcccagatcctgccggacccgagcaagccctccaagaggtccttcatcgaggacctcttgttcaacaaggtgactctcgcggatgccggcttcatcaaacagtatggggactgcctgggtgacatcgccgccagggacctgatctgcgcgcagaagttcaaggggctgacagtgctgcccccgctcctgacggacgagatgatcgctcagtacacgtccgcgctgttggcggggacgattacgagcggctggacgttcggagcgggggcagcactgcagatccctttcgcgatgcagatggcctacaggttcaatggcatcggtgtcacccagaacgtactctacgagaatcagaagctcatcgccaatcagttcaacagcgcgatcgggaagatccaggactccctgtcgagtacagcctccgcgttggggaagctgcaggacgtggttaaccacaacgcccaggccctgaacaccctggtgaagcagctgtcatccaagttcggggccatcagttcggtgctgaacgacatcttcagtcggctggaccccccggaggcggaggtccagatagatcgcctcatcaccgggcgcctccagagtttgcagacgtacgtgactcagcagctcatacgggctgctgagatacgtgcgtctgcaaacctggcggcgaccaagatgagcgagtgtgtacttggtcagagcaagcgggtcgacttctgcgggaagggctatcacctgatgtccttcccgcagagcgccccccacggggtggtcttcctgcacgtgacgtatgtgccggcgcaggagaagaacttcaccactgcgccggccatatgtcacgacgggaaggcccacttcccccgggagggcgtgttcgtgtcgaatgggacgcactggttcgtcacccagcggaacttctatgaaccacagataatcaccactgacaacaccttcgtcagtgggaactgcgatgtggtcataggaatcgtcaacaacacggtgtacgacccccttcagcccgagctggactcgttcaaggaggagctggacaaatacttcaagaaccacacgagcccggatgttgacctcggggacattagcggaatcaatgcctccgtggtcaacatccaaaaggagatcgacaggctcaacgaggtggccaagaacctcaacgagagcctgatcgatctccaggagctcggcaagtacgagcagtacatcaagtggccgtggtacatatggctggggttcatcgcagggctgatcgcgatcgtgatggtcacgatcatgctctgctgcatgacctcgtgctgctcgtgcttgaagggctgctgctcgtgtggttcttgctgcaagttcgacgaggacgattccgagccggtgctgaagggggtcaaactgcactacacctgataagccgccgctccagctttgcacgtttcgatcccaaaggccctttttagggccgacca

SEQ ID NO: 151 - RNA, 3906 nt, synthetic construct
  source 1..3906: mol_type = other RNA
agaagctgtctatcgggctccagcggtcatgttcgtgttcctggtgttgttgccgctggtgtcgagccagtgcgtcaacctgacgacacggacacagctgccccccgcgtacacgaactcgttcacgcggggggtgtactacccagacaaggtcttcaggagcagcgtgctgcacagcacgcaggacctcttcctcccgttcttctccaatgtcacgtggttccacgtgatatcggggacgaacgggacgaagaggttcgacaaccccgtgctcccgttcaatgacggggtgtacttcgcgtcgatcgagaagagtaacatcattcgagggtggatttttggcactaccctggactcgaagactcagagcctgctcatagtcaacaacgccaccaacgtggtgatcaaggtctgtgagttccagttctgcaacgacccgttcttggaccacaagaacaacaagagctggatggagtctgagtttcgagtctacagtagtgccaacaattgcaccttcgaatatgtgagccagccgttcctgatggacctggagggcaagcagggcaacttcaagaacttgcgcgagtttgtcttcaagaacatcgacggctacttcaagatctactcgaagcacaccccgatcattgtgcgggagccggaggacctgccgcagggcttcagcgctctggaaccgctggtggacttgcccatcggcatcaacatcacgcggttccagacgctgctggccctgcacaggtcctacctgactccgggagactcttcgtcggggtggaccgcgggtgcagccgcctactacgtgggctacctgcagccgcggacgttcttgttgaagtacaacgagaacggcacaatcaccgacgcggtggattgtgccctcgacccgctgagcgagaccaagtgcacactcaagagcttcacggtggagaaggggatctatcagacctccaacttccgggtccagccgactgagagcatcgttcggttcccgaacatcaccaacctgtgcccgtttgacgaggtgttcaacgccacgcggttcgcgtccgtgtacgcctggaaccggaaacggatctcgaactgcgtggcggactactcagtgttgtacaacctcgccccgttcttcaccttcaagtgctacggggtgagccccacaaagctgaacgacctctgcttcaccaacgtctacgcggatagcttcgtgatccgcggcgacgaggtgaggcagatcgcacctggtcagacgggcaacatcgccgactataattacaagctgcctgatgatttcacgggatgtgtcatcgcttggaacagcaacaagttggactccaaggtgagcgggaactataactacctgtaccgcttatttcggaagtccaacttgaagccgttcgagcgagacatatccacggagatctatcaggcaggcaataagccctgcaacggggtggcagggttcaattgttactttcccctgaggtcgtactctttccggcccacatacggggtggggcaccagccttacagggtggtggtgctatccttcgagttgctgcacgccccagccaccgtatgtgggccgaagaagagtacgaacctcgtgaagaacaagtgcgtcaacttcaacttcaacgggttgaaggggacgggcgtgctcacggagagtaacaagaaattcctgccattccagcagttcgggcgtgatatcgctgacaccaccgacgcggtgcgggatccccagaccctggagatcctggacatcacgccgtgcagcttcggtggtgtcagcgtgatcacgcccggcaccaacacctcgaaccaggtggcagtgctttaccagggtgtgaactgcactgaggtgcctgtggctatccacgccgatcagctgaccccaacgtggagggtgtactcgacagggagcaacgtcttccagacccgcgctggctgcctgattggcgctgagtacgtgaacaactcgtacgagtgcgacatccccattggggccggcatctgcgcgagttaccagacccagaccaagagccatcggagggcgagatcggtggcatcccagtcgatcatcgcctacacgatgagcctgggggccgagaacagcgtggcctacagcaacaacagcatcgctatccccacaaactttacaatcagtgtgaccaccgagatcttgcccgtcagcatgaccaagacctcggtggactgcactatgtacatctgtggggatagcaccgagtgttccaacctgctcctccagtacggctcgttctgcacgcaactgaagcgtgcattgacgggcatcgcggtggagcaggacaagaacactcaggaggtgtttgctcaggtcaagcagatctacaagacgcccccgatcaagtacttcgggggcttcaacttctcccagatcctgccggacccgagcaagccctccaagaggtccttcatcgaggacctcttgttcaacaaggtgactctcgcggatgccggcttcatcaaacagtatggggactgcctgggtgacatcgccgccagggacctgatctgcgcgcagaagttcaaggggctgacagtgctgcccccgctcctgacggacgagatgatcgctcagtacacgtccgcgctgttggcggggacgattacgagcggctggacgttcggagcgggggcagcactgcagatccctttcgcgatgcagatggcctacaggttcaatggcatcggtgtcacccagaacgtactctacgagaatcagaagctcatcgccaatcagttcaacagcgcgatcgggaagatccaggactccctgtcgagtacagcctccgcgttggggaagctgcaggacgtggttaaccacaacgcccaggccctgaacaccctggtgaagcagctgtcatccaagttcggggccatcagttcggtgctgaacgacatcttcagtcggctggaccccccggaggcggaggtccagatagatcgcctcatcaccgggcgcctccagagtttgcagacgtacgtgactcagcagctcatacgggctgctgagatacgtgcgtctgcaaacctggcggcgaccaagatgagcgagtgtgtacttggtcagagcaagcgggtcgacttctgcgggaagggctatcacctgatgtccttcccgcagagcgccccccacggggtggtcttcctgcacgtgacgtatgtgccggcgcaggagaagaacttcaccactgcgccggccatatgtcacgacgggaaggcccacttcccccgggagggcgtgttcgtgtcgaatgggacgcactggttcgtcacccagcggaacttctatgaaccacagataatcaccactgacaacaccttcgtcagtgggaactgcgatgtggtcataggaatcgtcaacaacacggtgtacgacccccttcagcccgagctggactcgttcaaggaggagctggacaaatacttcaagaaccacacgagcccggatgttgacctcggggacattagcggaatcaatgcctccgtggtcaacatccaaaaggagatcgacaggctcaacgaggtggccaagaacctcaacgagagcctgatcgatctccaggagctcggcaagtacgagcagtacatcaagtggccgtggtacatatggctggggttcatcgcagggctgatcgcgatcgtgatggtcacgatcatgctctgctgcatgacctcgtgctgctcgtgcttgaagggctgctgctcgtgtggttcttgctgcaagttcgacgaggacgattccgagccggtgctgaagggggtcaaactgcactacacctgataatctagagccgccgctccagctttgcacgtttcgatcccaaaggccctttttagggccgacca

SEQ ID NO: 152 - RNA, 3909 nt, synthetic construct
  source 1..3909: mol_type = other RNA
aggagaagctgtctatcgggctccagcggtcatgttcgtgttcctggtgttgttgccgctggtgtcgagccagtgcgtcaacctgacgacacggacacagctgccccccgcgtacacgaactcgttcacgcggggggtgtactacccagacaaggtcttcaggagcagcgtgctgcacagcacgcaggacctcttcctcccgttcttctccaatgtcacgtggttccacgtgatatcggggacgaacgggacgaagaggttcgacaaccccgtgctcccgttcaatgacggggtgtacttcgcgtcgatcgagaagagtaacatcattcgagggtggatttttggcactaccctggactcgaagactcagagcctgctcatagtcaacaacgccaccaacgtggtgatcaaggtctgtgagttccagttctgcaacgacccgttcttggaccacaagaacaacaagagctggatggagtctgagtttcgagtctacagtagtgccaacaattgcaccttcgaatatgtgagccagccgttcctgatggacctggagggcaagcagggcaacttcaagaacttgcgcgagtttgtcttcaagaacatcgacggctacttcaagatctactcgaagcacaccccgatcattgtgcgggagccggaggacctgccgcagggcttcagcgctctggaaccgctggtggacttgcccatcggcatcaacatcacgcggttccagacgctgctggccctgcacaggtcctacctgactccgggagactcttcgtcggggtggaccgcgggtgcagccgcctactacgtgggctacctgcagccgcggacgttcttgttgaagtacaacgagaacggcacaatcaccgacgcggtggattgtgccctcgacccgctgagcgagaccaagtgcacactcaagagcttcacggtggagaaggggatctatcagacctccaacttccgggtccagccgactgagagcatcgttcggttcccgaacatcaccaacctgtgcccgtttgacgaggtgttcaacgccacgcggttcgcgtccgtgtacgcctggaaccggaaacggatctcgaactgcgtggcggactactcagtgttgtacaacctcgccccgttcttcaccttcaagtgctacggggtgagccccacaaagctgaacgacctctgcttcaccaacgtctacgcggatagcttcgtgatccgcggcgacgaggtgaggcagatcgcacctggtcagacgggcaacatcgccgactataattacaagctgcctgatgatttcacgggatgtgtcatcgcttggaacagcaacaagttggactccaaggtgagcgggaactataactacctgtaccgcttatttcggaagtccaacttgaagccgttcgagcgagacatatccacggagatctatcaggcaggcaataagccctgcaacggggtggcagggttcaattgttactttcccctgaggtcgtactctttccggcccacatacggggtggggcaccagccttacagggtggtggtgctatccttcgagttgctgcacgccccagccaccgtatgtgggccgaagaagagtacgaacctcgtgaagaacaagtgcgtcaacttcaacttcaacgggttgaaggggacgggcgtgctcacggagagtaacaagaaattcctgccattccagcagttcgggcgtgatatcgctgacaccaccgacgcggtgcgggatccccagaccctggagatcctggacatcacgccgtgcagcttcggtggtgtcagcgtgatcacgcccggcaccaacacctcgaaccaggtggcagtgctttaccagggtgtgaactgcactgaggtgcctgtggctatccacgccgatcagctgaccccaacgtggagggtgtactcgacagggagcaacgtcttccagacccgcgctggctgcctgattggcgctgagtacgtgaacaactcgtacgagtgcgacatccccattggggccggcatctgcgcgagttaccagacccagaccaagagccatcggagggcgagatcggtggcatcccagtcgatcatcgcctacacgatgagcctgggggccgagaacagcgtggcctacagcaacaacagcatcgctatccccacaaactttacaatcagtgtgaccaccgagatcttgcccgtcagcatgaccaagacctcggtggactgcactatgtacatctgtggggatagcaccgagtgttccaacctgctcctccagtacggctcgttctgcacgcaactgaagcgtgcattgacgggcatcgcggtggagcaggacaagaacactcaggaggtgtttgctcaggtcaagcagatctacaagacgcccccgatcaagtacttcgggggcttcaacttctcccagatcctgccggacccgagcaagccctccaagaggtccttcatcgaggacctcttgttcaacaaggtgactctcgcggatgccggcttcatcaaacagtatggggactgcctgggtgacatcgccgccagggacctgatctgcgcgcagaagttcaaggggctgacagtgctgcccccgctcctgacggacgagatgatcgctcagtacacgtccgcgctgttggcggggacgattacgagcggctggacgttcggagcgggggcagcactgcagatccctttcgcgatgcagatggcctacaggttcaatggcatcggtgtcacccagaacgtactctacgagaatcagaagctcatcgccaatcagttcaacagcgcgatcgggaagatccaggactccctgtcgagtacagcctccgcgttggggaagctgcaggacgtggttaaccacaacgcccaggccctgaacaccctggtgaagcagctgtcatccaagttcggggccatcagttcggtgctgaacgacatcttcagtcggctggaccccccggaggcggaggtccagatagatcgcctcatcaccgggcgcctccagagtttgcagacgtacgtgactcagcagctcatacgggctgctgagatacgtgcgtctgcaaacctggcggcgaccaagatgagcgagtgtgtacttggtcagagcaagcgggtcgacttctgcgggaagggctatcacctgatgtccttcccgcagagcgccccccacggggtggtcttcctgcacgtgacgtatgtgccggcgcaggagaagaacttcaccactgcgccggccatatgtcacgacgggaaggcccacttcccccgggagggcgtgttcgtgtcgaatgggacgcactggttcgtcacccagcggaacttctatgaaccacagataatcaccactgacaacaccttcgtcagtgggaactgcgatgtggtcataggaatcgtcaacaacacggtgtacgacccccttcagcccgagctggactcgttcaaggaggagctggacaaatacttcaagaaccacacgagcccggatgttgacctcggggacattagcggaatcaatgcctccgtggtcaacatccaaaaggagatcgacaggctcaacgaggtggccaagaacctcaacgagagcctgatcgatctccaggagctcggcaagtacgagcagtacatcaagtggccgtggtacatatggctggggttcatcgcagggctgatcgcgatcgtgatggtcacgatcatgctctgctgcatgacctcgtgctgctcgtgcttgaagggctgctgctcgtgtggttcttgctgcaagttcgacgaggacgattccgagccggtgctgaagggggtcaaactgcactacacctgataatctagagccgccgctccagctttgcacgtttcgatcccaaaggccctttttagggccgacca

SEQ ID NO: 153 - RNA, 4045 nt, synthetic construct
  source 1..4045: mol_type = other RNA
aggagaagctgtctatcgggctccagcggtcatgttcgtgttcctggtgttgttgccgctggtgtcgagccagtgcgtcaacctgacgacacggacacagctgccccccgcgtacacgaactcgttcacgcggggggtgtactacccagacaaggtcttcaggagcagcgtgctgcacagcacgcaggacctcttcctcccgttcttctccaatgtcacgtggttccacgtgatatcggggacgaacgggacgaagaggttcgacaaccccgtgctcccgttcaatgacggggtgtacttcgcgtcgatcgagaagagtaacatcattcgagggtggatttttggcactaccctggactcgaagactcagagcctgctcatagtcaacaacgccaccaacgtggtgatcaaggtctgtgagttccagttctgcaacgacccgttcttggaccacaagaacaacaagagctggatggagtctgagtttcgagtctacagtagtgccaacaattgcaccttcgaatatgtgagccagccgttcctgatggacctggagggcaagcagggcaacttcaagaacttgcgcgagtttgtcttcaagaacatcgacggctacttcaagatctactcgaagcacaccccgatcattgtgcgggagccggaggacctgccgcagggcttcagcgctctggaaccgctggtggacttgcccatcggcatcaacatcacgcggttccagacgctgctggccctgcacaggtcctacctgactccgggagactcttcgtcggggtggaccgcgggtgcagccgcctactacgtgggctacctgcagccgcggacgttcttgttgaagtacaacgagaacggcacaatcaccgacgcggtggattgtgccctcgacccgctgagcgagaccaagtgcacactcaagagcttcacggtggagaaggggatctatcagacctccaacttccgggtccagccgactgagagcatcgttcggttcccgaacatcaccaacctgtgcccgtttgacgaggtgttcaacgccacgcggttcgcgtccgtgtacgcctggaaccggaaacggatctcgaactgcgtggcggactactcagtgttgtacaacctcgccccgttcttcaccttcaagtgctacggggtgagccccacaaagctgaacgacctctgcttcaccaacgtctacgcggatagcttcgtgatccgcggcgacgaggtgaggcagatcgcacctggtcagacgggcaacatcgccgactataattacaagctgcctgatgatttcacgggatgtgtcatcgcttggaacagcaacaagttggactccaaggtgagcgggaactataactacctgtaccgcttatttcggaagtccaacttgaagccgttcgagcgagacatatccacggagatctatcaggcaggcaataagccctgcaacggggtggcagggttcaattgttactttcccctgaggtcgtactctttccggcccacatacggggtggggcaccagccttacagggtggtggtgctatccttcgagttgctgcacgccccagccaccgtatgtgggccgaagaagagtacgaacctcgtgaagaacaagtgcgtcaacttcaacttcaacgggttgaaggggacgggcgtgctcacggagagtaacaagaaattcctgccattccagcagttcgggcgtgatatcgctgacaccaccgacgcggtgcgggatccccagaccctggagatcctggacatcacgccgtgcagcttcggtggtgtcagcgtgatcacgcccggcaccaacacctcgaaccaggtggcagtgctttaccagggtgtgaactgcactgaggtgcctgtggctatccacgccgatcagctgaccccaacgtggagggtgtactcgacagggagcaacgtcttccagacccgcgctggctgcctgattggcgctgagtacgtgaacaactcgtacgagtgcgacatccccattggggccggcatctgcgcgagttaccagacccagaccaagagccatcggagggcgagatcggtggcatcccagtcgatcatcgcctacacgatgagcctgggggccgagaacagcgtggcctacagcaacaacagcatcgctatccccacaaactttacaatcagtgtgaccaccgagatcttgcccgtcagcatgaccaagacctcggtggactgcactatgtacatctgtggggatagcaccgagtgttccaacctgctcctccagtacggctcgttctgcacgcaactgaagcgtgcattgacgggcatcgcggtggagcaggacaagaacactcaggaggtgtttgctcaggtcaagcagatctacaagacgcccccgatcaagtacttcgggggcttcaacttctcccagatcctgccggacccgagcaagccctccaagaggtccttcatcgaggacctcttgttcaacaaggtgactctcgcggatgccggcttcatcaaacagtatggggactgcctgggtgacatcgccgccagggacctgatctgcgcgcagaagttcaaggggctgacagtgctgcccccgctcctgacggacgagatgatcgctcagtacacgtccgcgctgttggcggggacgattacgagcggctggacgttcggagcgggggcagcactgcagatccctttcgcgatgcagatggcctacaggttcaatggcatcggtgtcacccagaacgtactctacgagaatcagaagctcatcgccaatcagttcaacagcgcgatcgggaagatccaggactccctgtcgagtacagcctccgcgttggggaagctgcaggacgtggttaaccacaacgcccaggccctgaacaccctggtgaagcagctgtcatccaagttcggggccatcagttcggtgctgaacgacatcttcagtcggctggaccccccggaggcggaggtccagatagatcgcctcatcaccgggcgcctccagagtttgcagacgtacgtgactcagcagctcatacgggctgctgagatacgtgcgtctgcaaacctggcggcgaccaagatgagcgagtgtgtacttggtcagagcaagcgggtcgacttctgcgggaagggctatcacctgatgtccttcccgcagagcgccccccacggggtggtcttcctgcacgtgacgtatgtgccggcgcaggagaagaacttcaccactgcgccggccatatgtcacgacgggaaggcccacttcccccgggagggcgtgttcgtgtcgaatgggacgcactggttcgtcacccagcggaacttctatgaaccacagataatcaccactgacaacaccttcgtcagtgggaactgcgatgtggtcataggaatcgtcaacaacacggtgtacgacccccttcagcccgagctggactcgttcaaggaggagctggacaaatacttcaagaaccacacgagcccggatgttgacctcggggacattagcggaatcaatgcctccgtggtcaacatccaaaaggagatcgacaggctcaacgaggtggccaagaacctcaacgagagcctgatcgatctccaggagctcggcaagtacgagcagtacatcaagtggccgtggtacatatggctggggttcatcgcagggctgatcgcgatcgtgatggtcacgatcatgctctgctgcatgacctcgtgctgctcgtgcttgaagggctgctgctcgtgtggttcttgctgcaagttcgacgaggacgattccgagccggtgctgaagggggtcaaactgcactacacctgataatctagagccgccgctccagctttgcacgtttcgatcccaaaggccctttttagggccgaccattcattgcaaaaaaaaaaaaaaaaaaaaaaaaaaaaaagcatatgactaaaaaaaaaaaaaaaaaaaaaaaaaaaaaaaaaaaaaaaaaaaaaaaaaaaaaaaaaaaaaaaaaaaaaaaaaaaaaaaaaaaaaaaa

SEQ ID NO: 154 - RNA, 4067 nt, synthetic construct
  source 1..4067: mol_type = other RNA
gttccctatcactctctttaatcactactcacagtaacctcaactcctgccacaatgttcgtgtttctggtgctgctgcctctggtgagcagccagtgcgtgaacctgaccacacgcacccagctgccaccggcttacaccaacagcttcacccgcggggtgtactaccccgacaaggtgttcaggtccagtgtgctgcacagcacacaggacctgttcctgcccttcttcagcaacgtgacttggttccatgtgatcagcggcaccaatgggaccaagcgcttcgacaaccccgtgctgccattcaatgacggcgtgtacttcgccagcatcgagaagagtaacatcatcaggggctggatcttcggcaccaccctcgacagcaagacccagtctctgctgatcgtgaacaacgccacgaacgtggtgattaaggtgtgcgagttccagttctgtaatgatcccttcctggatcacaagaataataaatcctggatggagtccgagttcagggtgtactccagcgccaacaattgcaccttcgagtacgtgtcccagcccttcctgatggacctggagggcaagcaggggaacttcaagaatctgagagagttcgtgttcaagaacatcgatggatacttcaagatctactcgaagcacacccccatcatcgtgagggagccagaggacctgccccaggggttcagcgctctggagccactggtggacctgccaatcgggattaatatcaccaggttccagaccctgctggctctgcaccggagctacctgacccctggggacagctcctctggctggaccgccggggctgcggcctactacgtgggctacctgcagccccggacattcctgctgaagtacaacgagaatgggaccatcacggacgctgtggactgcgcgctggaccctctgtccgagaccaagtgtacactgaagagtttcaccgtggagaaggggatctaccagacctccaacttcagggtgcagccgaccgagagcattgtgcgcttcccaaatatcaccaacctgtgccccttcgacgaggtgttcaatgccactcggttcgcttcagtgtacgcttggaatcggaagaggatctccaactgcgtggcggactacagcgtcctgtacaacctggccccattcttcaccttcaagtgctacggggtgtcccccacaaagctgaacgacctgtgcttcactaatgtgtacgcggacagctttgtgatccgcggcgatgaggtgcggcagattgcccccggccagactgggaacatcgccgactacaactacaagctgccagacgacttcaccggctgcgtgatcgcctggaacagcaacaagctggactccaaggtgtctggcaactataactacctgtatcggctgttccggaagagtaacctgaagcccttcgagcgggacatctccaccgagatctaccaggctggaaataagccatgcaacggcgtggcgggcttcaattgctacttccccctgcgctcttacagcttcaggcccacatacggggtggggcaccagccctacagggtggtggtgctgagcttcgagctcctgcacgcccccgccaccgtgtgtgggccgaagaagagtacaaacctggtgaagaacaagtgcgtgaacttcaacttcaacgggctgaaagggacaggagtgctgacagagtccaacaagaaattcctgccctttcagcagtttggacgggacatcgccgacaccaccgacgccgtgagggatccccagaccctggagatcctggacatcacaccctgtagcttcgggggggtgtctgtgatcacgcctgggacaaacacctccaaccaggtggctgtgctgtaccagggcgtgaattgcactgaggtgccagtggcgattcacgccgaccagctgacacccacctggcgggtgtactctaccggctccaatgtgttccagaccagggccggctgcctgatcggggctgagtacgtgaacaacagctacgaatgcgacatccccatcggggccggcatttgtgccagctaccagacacagaccaagtcccacaggcgggcccggagcgtggcctcccagagcatcatcgcctacacaatgagcctgggggccgagaactccgtggcctacagcaacaactccatcgctatccccacaaacttcacaatcagcgtgaccacagagatcctgcctgtctctatgaccaagacctctgtggactgcaccatgtacatctgtggggatagcaccgagtgcagcaacctgctgctgcagtacggcagcttctgcactcagctgaagcgggccctgactgggatcgccgtggagcaggacaagaatacccaggaggtgtttgcccaggtgaagcagatctacaagacaccccccatcaagtacttcggcgggttcaacttctctcagattctgccagaccccagcaagccctccaagcggtccttcattgaggacctgctgtttaacaaggtgaccctggccgacgccgggttcatcaagcagtacggggactgcctgggcgacatcgccgcccgcgacctcatctgtgcgcagaagtttaaggggctgaccgtgctgccccccctgctgacagatgagatgatcgcccagtacacctccgcgctgctggctgggaccatcacctcggggtggacttttggcgctggagccgcgctgcagatccccttcgccatgcagatggcctatcggttcaacgggatcggggtgacacagaacgtgctgtacgagaaccagaagctgatcgccaatcagtttaacagcgccatcgggaagattcaggacagcctgagctccacagcttccgccctggggaagctgcaggatgtggtgaaccacaacgctcaggccctgaacaccctggtgaagcagctgagctccaagtttggggccatctccagcgtgctgaacgacatcttcagcaggctggacccacccgaggccgaggtccagatcgaccggctcatcacggggcggctgcagagcctgcagacctacgtgactcagcagctcatcagagctgctgagatcagggcttctgccaacctggccgccaccaagatgagcgagtgcgtgctgggccagagcaagcgggtggacttctgtgggaagggctaccacctgatgtccttcccacagagcgccccccacggggtggtgttcctgcacgtgacctacgtgcccgctcaggagaagaacttcaccaccgccccggccatttgccacgacggcaaggcccacttccccagggagggcgtgttcgtgtccaacgggacacactggttcgtgacacagcgcaacttctatgagccccagatcatcacaaccgacaacacattcgtgagcgggaactgcgacgtggtgatcgggatcgtgaacaacaccgtgtacgatcccctgcagcctgagctggactccttcaaggaagaactggacaagtacttcaagaaccacacctccccagacgtggatctgggggacatcagcggcatcaacgccagcgtggtgaacatccagaaggagatcgaccggctgaacgaggtggccaagaatctgaatgagtccctgatcgacctccaggagctggggaagtacgagcagtacatcaagtggccctggtacatctggctggggttcatcgccgggctgatcgccatcgtgatggtgaccatcatgctgtgctgcatgaccagctgctgcagctgcctgaaaggctgctgcagctgcgggtcgtgctgcaagttcgacgaggacgacagcgagcccgtgttgaaaggagtgaaactgcactacacctgataattaagtgcttcccacttaaaacatatcaggccttctatttatttaaatatttaaattttatatttattgttgaatgtatggtttgctacctattgtaactattattcttaatcttaaaactataaatatggatcttttatgattctttttgtaagccctaggggctctaaaatggtttcacttatttatcccaaaat

SEQ ID NO: 155 - RNA, 4073 nt, synthetic construct
  source 1..4073: mol_type = other RNA
gttccctatcactctctttaatcactactcacagtaacctcaactcctgccacaatgttcgtgtttctggtgctgctgcctctggtgagcagccagtgcgtgaacctgaccacacgcacccagctgccaccggcttacaccaacagcttcacccgcggggtgtactaccccgacaaggtgttcaggtccagtgtgctgcacagcacacaggacctgttcctgcccttcttcagcaacgtgacttggttccatgtgatcagcggcaccaatgggaccaagcgcttcgacaaccccgtgctgccattcaatgacggcgtgtacttcgccagcatcgagaagagtaacatcatcaggggctggatcttcggcaccaccctcgacagcaagacccagtctctgctgatcgtgaacaacgccacgaacgtggtgattaaggtgtgcgagttccagttctgtaatgatcccttcctggatcacaagaataataaatcctggatggagtccgagttcagggtgtactccagcgccaacaattgcaccttcgagtacgtgtcccagcccttcctgatggacctggagggcaagcaggggaacttcaagaatctgagagagttcgtgttcaagaacatcgatggatacttcaagatctactcgaagcacacccccatcatcgtgagggagccagaggacctgccccaggggttcagcgctctggagccactggtggacctgccaatcgggattaatatcaccaggttccagaccctgctggctctgcaccggagctacctgacccctggggacagctcctctggctggaccgccggggctgcggcctactacgtgggctacctgcagccccggacattcctgctgaagtacaacgagaatgggaccatcacggacgctgtggactgcgcgctggaccctctgtccgagaccaagtgtacactgaagagtttcaccgtggagaaggggatctaccagacctccaacttcagggtgcagccgaccgagagcattgtgcgcttcccaaatatcaccaacctgtgccccttcgacgaggtgttcaatgccactcggttcgcttcagtgtacgcttggaatcggaagaggatctccaactgcgtggcggactacagcgtcctgtacaacctggccccattcttcaccttcaagtgctacggggtgtcccccacaaagctgaacgacctgtgcttcactaatgtgtacgcggacagctttgtgatccgcggcgatgaggtgcggcagattgcccccggccagactgggaacatcgccgactacaactacaagctgccagacgacttcaccggctgcgtgatcgcctggaacagcaacaagctggactccaaggtgtctggcaactataactacctgtatcggctgttccggaagagtaacctgaagcccttcgagcgggacatctccaccgagatctaccaggctggaaataagccatgcaacggcgtggcgggcttcaattgctacttccccctgcgctcttacagcttcaggcccacatacggggtggggcaccagccctacagggtggtggtgctgagcttcgagctcctgcacgcccccgccaccgtgtgtgggccgaagaagagtacaaacctggtgaagaacaagtgcgtgaacttcaacttcaacgggctgaaagggacaggagtgctgacagagtccaacaagaaattcctgccctttcagcagtttggacgggacatcgccgacaccaccgacgccgtgagggatccccagaccctggagatcctggacatcacaccctgtagcttcgggggggtgtctgtgatcacgcctgggacaaacacctccaaccaggtggctgtgctgtaccagggcgtgaattgcactgaggtgccagtggcgattcacgccgaccagctgacacccacctggcgggtgtactctaccggctccaatgtgttccagaccagggccggctgcctgatcggggctgagtacgtgaacaacagctacgaatgcgacatccccatcggggccggcatttgtgccagctaccagacacagaccaagtcccacaggcgggcccggagcgtggcctcccagagcatcatcgcctacacaatgagcctgggggccgagaactccgtggcctacagcaacaactccatcgctatccccacaaacttcacaatcagcgtgaccacagagatcctgcctgtctctatgaccaagacctctgtggactgcaccatgtacatctgtggggatagcaccgagtgcagcaacctgctgctgcagtacggcagcttctgcactcagctgaagcgggccctgactgggatcgccgtggagcaggacaagaatacccaggaggtgtttgcccaggtgaagcagatctacaagacaccccccatcaagtacttcggcgggttcaacttctctcagattctgccagaccccagcaagccctccaagcggtccttcattgaggacctgctgtttaacaaggtgaccctggccgacgccgggttcatcaagcagtacggggactgcctgggcgacatcgccgcccgcgacctcatctgtgcgcagaagtttaaggggctgaccgtgctgccccccctgctgacagatgagatgatcgcccagtacacctccgcgctgctggctgggaccatcacctcggggtggacttttggcgctggagccgcgctgcagatccccttcgccatgcagatggcctatcggttcaacgggatcggggtgacacagaacgtgctgtacgagaaccagaagctgatcgccaatcagtttaacagcgccatcgggaagattcaggacagcctgagctccacagcttccgccctggggaagctgcaggatgtggtgaaccacaacgctcaggccctgaacaccctggtgaagcagctgagctccaagtttggggccatctccagcgtgctgaacgacatcttcagcaggctggacccacccgaggccgaggtccagatcgaccggctcatcacggggcggctgcagagcctgcagacctacgtgactcagcagctcatcagagctgctgagatcagggcttctgccaacctggccgccaccaagatgagcgagtgcgtgctgggccagagcaagcgggtggacttctgtgggaagggctaccacctgatgtccttcccacagagcgccccccacggggtggtgttcctgcacgtgacctacgtgcccgctcaggagaagaacttcaccaccgccccggccatttgccacgacggcaaggcccacttccccagggagggcgtgttcgtgtccaacgggacacactggttcgtgacacagcgcaacttctatgagccccagatcatcacaaccgacaacacattcgtgagcgggaactgcgacgtggtgatcgggatcgtgaacaacaccgtgtacgatcccctgcagcctgagctggactccttcaaggaagaactggacaagtacttcaagaaccacacctccccagacgtggatctgggggacatcagcggcatcaacgccagcgtggtgaacatccagaaggagatcgaccggctgaacgaggtggccaagaatctgaatgagtccctgatcgacctccaggagctggggaagtacgagcagtacatcaagtggccctggtacatctggctggggttcatcgccgggctgatcgccatcgtgatggtgaccatcatgctgtgctgcatgaccagctgctgcagctgcctgaaaggctgctgcagctgcgggtcgtgctgcaagttcgacgaggacgacagcgagcccgtgttgaaaggagtgaaactgcactacacctgataatctagattaagtgcttcccacttaaaacatatcaggccttctatttatttaaatatttaaattttatatttattgttgaatgtatggtttgctacctattgtaactattattcttaatcttaaaactataaatatggatcttttatgattctttttgtaagccctaggggctctaaaatggtttcacttatttatcccaaaat

SEQ ID NO: 156 - RNA, 4077 nt, synthetic construct
  source 1..4077: mol_type = other RNA
aggagttccctatcactctctttaatcactactcacagtaacctcaactcctgccacaatgttcgtgtttctggtgctgctgcctctggtgagcagccagtgcgtgaacctgaccacacgcacccagctgccaccggcttacaccaacagcttcacccgcggggtgtactaccccgacaaggtgttcaggtccagtgtgctgcacagcacacaggacctgttcctgcccttcttcagcaacgtgacttggttccatgtgatcagcggcaccaatgggaccaagcgcttcgacaaccccgtgctgccattcaatgacggcgtgtacttcgccagcatcgagaagagtaacatcatcaggggctggatcttcggcaccaccctcgacagcaagacccagtctctgctgatcgtgaacaacgccacgaacgtggtgattaaggtgtgcgagttccagttctgtaatgatcccttcctggatcacaagaataataaatcctggatggagtccgagttcagggtgtactccagcgccaacaattgcaccttcgagtacgtgtcccagcccttcctgatggacctggagggcaagcaggggaacttcaagaatctgagagagttcgtgttcaagaacatcgatggatacttcaagatctactcgaagcacacccccatcatcgtgagggagccagaggacctgccccaggggttcagcgctctggagccactggtggacctgccaatcgggattaatatcaccaggttccagaccctgctggctctgcaccggagctacctgacccctggggacagctcctctggctggaccgccggggctgcggcctactacgtgggctacctgcagccccggacattcctgctgaagtacaacgagaatgggaccatcacggacgctgtggactgcgcgctggaccctctgtccgagaccaagtgtacactgaagagtttcaccgtggagaaggggatctaccagacctccaacttcagggtgcagccgaccgagagcattgtgcgcttcccaaatatcaccaacctgtgccccttcgacgaggtgttcaatgccactcggttcgcttcagtgtacgcttggaatcggaagaggatctccaactgcgtggcggactacagcgtcctgtacaacctggccccattcttcaccttcaagtgctacggggtgtcccccacaaagctgaacgacctgtgcttcactaatgtgtacgcggacagctttgtgatccgcggcgatgaggtgcggcagattgcccccggccagactgggaacatcgccgactacaactacaagctgccagacgacttcaccggctgcgtgatcgcctggaacagcaacaagctggactccaaggtgtctggcaactataactacctgtatcggctgttccggaagagtaacctgaagcccttcgagcgggacatctccaccgagatctaccaggctggaaataagccatgcaacggcgtggcgggcttcaattgctacttccccctgcgctcttacagcttcaggcccacatacggggtggggcaccagccctacagggtggtggtgctgagcttcgagctcctgcacgcccccgccaccgtgtgtgggccgaagaagagtacaaacctggtgaagaacaagtgcgtgaacttcaacttcaacgggctgaaagggacaggagtgctgacagagtccaacaagaaattcctgccctttcagcagtttggacgggacatcgccgacaccaccgacgccgtgagggatccccagaccctggagatcctggacatcacaccctgtagcttcgggggggtgtctgtgatcacgcctgggacaaacacctccaaccaggtggctgtgctgtaccagggcgtgaattgcactgaggtgccagtggcgattcacgccgaccagctgacacccacctggcgggtgtactctaccggctccaatgtgttccagaccagggccggctgcctgatcggggctgagtacgtgaacaacagctacgaatgcgacatccccatcggggccggcatttgtgccagctaccagacacagaccaagtcccacaggcgggcccggagcgtggcctcccagagcatcatcgcctacacaatgagcctgggggccgagaactccgtggcctacagcaacaactccatcgctatccccacaaacttcacaatcagcgtgaccacagagatcctgcctgtctctatgaccaagacctctgtggactgcaccatgtacatctgtggggatagcaccgagtgcagcaacctgctgctgcagtacggcagcttctgcactcagctgaagcgggccctgactgggatcgccgtggagcaggacaagaatacccaggaggtgtttgcccaggtgaagcagatctacaagacaccccccatcaagtacttcggcgggttcaacttctctcagattctgccagaccccagcaagccctccaagcggtccttcattgaggacctgctgtttaacaaggtgaccctggccgacgccgggttcatcaagcagtacggggactgcctgggcgacatcgccgcccgcgacctcatctgtgcgcagaagtttaaggggctgaccgtgctgccccccctgctgacagatgagatgatcgcccagtacacctccgcgctgctggctgggaccatcacctcggggtggacttttggcgctggagccgcgctgcagatccccttcgccatgcagatggcctatcggttcaacgggatcggggtgacacagaacgtgctgtacgagaaccagaagctgatcgccaatcagtttaacagcgccatcgggaagattcaggacagcctgagctccacagcttccgccctggggaagctgcaggatgtggtgaaccacaacgctcaggccctgaacaccctggtgaagcagctgagctccaagtttggggccatctccagcgtgctgaacgacatcttcagcaggctggacccacccgaggccgaggtccagatcgaccggctcatcacggggcggctgcagagcctgcagacctacgtgactcagcagctcatcagagctgctgagatcagggcttctgccaacctggccgccaccaagatgagcgagtgcgtgctgggccagagcaagcgggtggacttctgtgggaagggctaccacctgatgtccttcccacagagcgccccccacggggtggtgttcctgcacgtgacctacgtgcccgctcaggagaagaacttcaccaccgccccggccatttgccacgacggcaaggcccacttccccagggagggcgtgttcgtgtccaacgggacacactggttcgtgacacagcgcaacttctatgagccccagatcatcacaaccgacaacacattcgtgagcgggaactgcgacgtggtgatcgggatcgtgaacaacaccgtgtacgatcccctgcagcctgagctggactccttcaaggaagaactggacaagtacttcaagaaccacacctccccagacgtggatctgggggacatcagcggcatcaacgccagcgtggtgaacatccagaaggagatcgaccggctgaacgaggtggccaagaatctgaatgagtccctgatcgacctccaggagctggggaagtacgagcagtacatcaagtggccctggtacatctggctggggttcatcgccgggctgatcgccatcgtgatggtgaccatcatgctgtgctgcatgaccagctgctgcagctgcctgaaaggctgctgcagctgcgggtcgtgctgcaagttcgacgaggacgacagcgagcccgtgttgaaaggagtgaaactgcactacacctgataatctagattaagtgcttcccacttaaaacatatcaggccttctatttatttaaatatttaaattttatatttattgttgaatgtatggtttgctacctattgtaactattattcttaatcttaaaactataaatatggatcttttatgattctttttgtaagccctaggggctctaaaatggtttcacttatttatcccaaaat

SEQ ID NO: 157 - RNA, 4213 nt, synthetic construct
  source 1..4213: mol_type = other RNA
aggagttccctatcactctctttaatcactactcacagtaacctcaactcctgccacaatgttcgtgtttctggtgctgctgcctctggtgagcagccagtgcgtgaacctgaccacacgcacccagctgccaccggcttacaccaacagcttcacccgcggggtgtactaccccgacaaggtgttcaggtccagtgtgctgcacagcacacaggacctgttcctgcccttcttcagcaacgtgacttggttccatgtgatcagcggcaccaatgggaccaagcgcttcgacaaccccgtgctgccattcaatgacggcgtgtacttcgccagcatcgagaagagtaacatcatcaggggctggatcttcggcaccaccctcgacagcaagacccagtctctgctgatcgtgaacaacgccacgaacgtggtgattaaggtgtgcgagttccagttctgtaatgatcccttcctggatcacaagaataataaatcctggatggagtccgagttcagggtgtactccagcgccaacaattgcaccttcgagtacgtgtcccagcccttcctgatggacctggagggcaagcaggggaacttcaagaatctgagagagttcgtgttcaagaacatcgatggatacttcaagatctactcgaagcacacccccatcatcgtgagggagccagaggacctgccccaggggttcagcgctctggagccactggtggacctgccaatcgggattaatatcaccaggttccagaccctgctggctctgcaccggagctacctgacccctggggacagctcctctggctggaccgccggggctgcggcctactacgtgggctacctgcagccccggacattcctgctgaagtacaacgagaatgggaccatcacggacgctgtggactgcgcgctggaccctctgtccgagaccaagtgtacactgaagagtttcaccgtggagaaggggatctaccagacctccaacttcagggtgcagccgaccgagagcattgtgcgcttcccaaatatcaccaacctgtgccccttcgacgaggtgttcaatgccactcggttcgcttcagtgtacgcttggaatcggaagaggatctccaactgcgtggcggactacagcgtcctgtacaacctggccccattcttcaccttcaagtgctacggggtgtcccccacaaagctgaacgacctgtgcttcactaatgtgtacgcggacagctttgtgatccgcggcgatgaggtgcggcagattgcccccggccagactgggaacatcgccgactacaactacaagctgccagacgacttcaccggctgcgtgatcgcctggaacagcaacaagctggactccaaggtgtctggcaactataactacctgtatcggctgttccggaagagtaacctgaagcccttcgagcgggacatctccaccgagatctaccaggctggaaataagccatgcaacggcgtggcgggcttcaattgctacttccccctgcgctcttacagcttcaggcccacatacggggtggggcaccagccctacagggtggtggtgctgagcttcgagctcctgcacgcccccgccaccgtgtgtgggccgaagaagagtacaaacctggtgaagaacaagtgcgtgaacttcaacttcaacgggctgaaagggacaggagtgctgacagagtccaacaagaaattcctgccctttcagcagtttggacgggacatcgccgacaccaccgacgccgtgagggatccccagaccctggagatcctggacatcacaccctgtagcttcgggggggtgtctgtgatcacgcctgggacaaacacctccaaccaggtggctgtgctgtaccagggcgtgaattgcactgaggtgccagtggcgattcacgccgaccagctgacacccacctggcgggtgtactctaccggctccaatgtgttccagaccagggccggctgcctgatcggggctgagtacgtgaacaacagctacgaatgcgacatccccatcggggccggcatttgtgccagctaccagacacagaccaagtcccacaggcgggcccggagcgtggcctcccagagcatcatcgcctacacaatgagcctgggggccgagaactccgtggcctacagcaacaactccatcgctatccccacaaacttcacaatcagcgtgaccacagagatcctgcctgtctctatgaccaagacctctgtggactgcaccatgtacatctgtggggatagcaccgagtgcagcaacctgctgctgcagtacggcagcttctgcactcagctgaagcgggccctgactgggatcgccgtggagcaggacaagaatacccaggaggtgtttgcccaggtgaagcagatctacaagacaccccccatcaagtacttcggcgggttcaacttctctcagattctgccagaccccagcaagccctccaagcggtccttcattgaggacctgctgtttaacaaggtgaccctggccgacgccgggttcatcaagcagtacggggactgcctgggcgacatcgccgcccgcgacctcatctgtgcgcagaagtttaaggggctgaccgtgctgccccccctgctgacagatgagatgatcgcccagtacacctccgcgctgctggctgggaccatcacctcggggtggacttttggcgctggagccgcgctgcagatccccttcgccatgcagatggcctatcggttcaacgggatcggggtgacacagaacgtgctgtacgagaaccagaagctgatcgccaatcagtttaacagcgccatcgggaagattcaggacagcctgagctccacagcttccgccctggggaagctgcaggatgtggtgaaccacaacgctcaggccctgaacaccctggtgaagcagctgagctccaagtttggggccatctccagcgtgctgaacgacatcttcagcaggctggacccacccgaggccgaggtccagatcgaccggctcatcacggggcggctgcagagcctgcagacctacgtgactcagcagctcatcagagctgctgagatcagggcttctgccaacctggccgccaccaagatgagcgagtgcgtgctgggccagagcaagcgggtggacttctgtgggaagggctaccacctgatgtccttcccacagagcgccccccacggggtggtgttcctgcacgtgacctacgtgcccgctcaggagaagaacttcaccaccgccccggccatttgccacgacggcaaggcccacttccccagggagggcgtgttcgtgtccaacgggacacactggttcgtgacacagcgcaacttctatgagccccagatcatcacaaccgacaacacattcgtgagcgggaactgcgacgtggtgatcgggatcgtgaacaacaccgtgtacgatcccctgcagcctgagctggactccttcaaggaagaactggacaagtacttcaagaaccacacctccccagacgtggatctgggggacatcagcggcatcaacgccagcgtggtgaacatccagaaggagatcgaccggctgaacgaggtggccaagaatctgaatgagtccctgatcgacctccaggagctggggaagtacgagcagtacatcaagtggccctggtacatctggctggggttcatcgccgggctgatcgccatcgtgatggtgaccatcatgctgtgctgcatgaccagctgctgcagctgcctgaaaggctgctgcagctgcgggtcgtgctgcaagttcgacgaggacgacagcgagcccgtgttgaaaggagtgaaactgcactacacctgataatctagattaagtgcttcccacttaaaacatatcaggccttctatttatttaaatatttaaattttatatttattgttgaatgtatggtttgctacctattgtaactattattcttaatcttaaaactataaatatggatcttttatgattctttttgtaagccctaggggctctaaaatggtttcacttatttatcccaaaatttcattgcaaaaaaaaaaaaaaaaaaaaaaaaaaaaaagcatatgactaaaaaaaaaaaaaaaaaaaaaaaaaaaaaaaaaaaaaaaaaaaaaaaaaaaaaaaaaaaaaaaaaaaaaaaaaaaaaaaaaaaaaaaa

SEQ ID NO: 158 - RNA, 4067 nt, synthetic construct
  source 1..4067: mol_type = other RNA
gttccctatcactctctttaatcactactcacagtaacctcaactcctgccacaatgttcgtgttcctggtgctgctccccctggtcagctcacagtgcgtgaacctgaccactcgcacacagctgcccccagcttacactaactccttcacccgcggggtgtactaccccgacaaggtgttcaggagtagtgtgctgcacagcacccaggacctctttctcccattcttctccaacgtcacgtggttccacgtgatcagcgggacaaatgggacaaagaggttcgacaaccctgtgctgcccttcaacgatggggtgtacttcgcctccatcgagaagagtaacatcatcaggggctggatctttgggaccaccctggactcaaagacccagtccctgctgatcgtgaacaacgccaccaatgtggtcatcaaggtgtgcgagttccagttctgcaacgatccattcctggatcacaaaaacaacaagagctggatggagagtgagttccgggtgtacagcagcgcgaacaactgcacgttcgaatacgtgtcacagccattcctgatggacctggaggggaagcagggcaattttaagaacctgcgcgagttcgtcttcaagaacatcgacgggtattttaagatctactccaagcacacacccatcatcgtcagggagcccgaggatctgccccagggcttctctgccctggagccgctggtggacctccccataggaattaacatcaccaggttccagacactcctggccctgcacaggagctacctgacacctggtgacagttccagtgggtggacggccggggctgcagcctactacgtgggctacctgcagccccggaccttcctgctgaagtacaacgagaatgggaccattacagacgctgtggactgcgcactggatcctctgtccgagaccaagtgtacactgaagagtttcaccgtggagaaggggatctaccagacctccaacttcagggtgcagccgaccgagagcattgtgcgcttcccaaatatcacaaacctgtgccccttcgacgaggtgttcaatgctactcggttcgcttcagtgtacgcttggaatcggaagaggatcagcaactgcgtggcagactacagcgtcctgtacaacctggccccattcttcacattcaagtgctacggcgtctcccccacgaagctgaatgacctgtgcttcaccaacgtgtacgcagacagcttcgtgatccggggagacgaggtccgccagatcgctccagggcagaccggcaacatcgccgactacaactacaagctccctgacgacttcaccgggtgtgtgatcgcttggaacagcaacaagctggacagcaaggtgtccggcaactacaactacctgtaccgcctgtttcgcaagtccaacctgaagcccttcgagcgggatatctccacagagatctaccaggctggcaacaagccctgcaacggcgtggcgggcttcaactgctacttcccactgaggtcttactccttcaggcccacatacggggtggggcaccagccctaccgcgtggtggtgctcagctttgagctcctccacgcccccgccaccgtgtgtgggcccaagaagagtaccaacctggtgaagaacaagtgcgtgaacttcaacttcaacgggctcaaggggaccggcgtcctcaccgagtccaacaagaagttcctgcccttccagcagtttggcagagacatcgccgacactacagacgcggtccgggatccccagaccctggagatcctggacatcacgccctgtagcttcggcggtgtctctgtcatcactcccggtaccaacacatccaaccaggtggcggtgctgtaccagggcgtgaattgcactgaggtgccagtggcaattcacgccgatcagctgacacccacctggcgggtgtacagtaccgggagcaacgtgttccagacacgggcaggatgtctgatcggcgctgagtacgtgaacaacagctacgagtgcgacatccccattggagcgggcatctgcgccagctaccagacccagactaagagccacaggcgggcccgctctgtggcctcacagagcatcatcgcctacactatgagtctgggggctgagaacagcgtggcctactccaacaacagcatcgcaatcccaaccaacttcacaatcagcgtcaccacggagatcctgcccgtgtctatgaccaagacctcagtggactgcacaatgtacatctgcggggacagcaccgagtgttccaacctcctgctccagtacggcagtttctgtacacagctcaaaagggccctgacaggtatagccgtggagcaggacaagaacactcaggaggtgttcgcgcaggtgaagcagatctacaagactcctcccatcaagtactttggagggtttaacttcagccagatcctgcctgaccccagcaaaccctccaagaggagcttcatcgaggatctgctctttaacaaagtcaccctcgccgacgcagggttcattaagcagtacggtgactgtctgggagatatcgccgctcgggatctcatctgtgcgcagaagttcaagggactgaccgtcctgccacccctgctcacggatgagatgatcgcccagtacaccagcgccctgctggctgggacgatcacttcaggttggactttcggggcaggcgccgccctgcagatccccttcgccatgcagatggcctacaggttcaacgggatcggcgtgacacagaatgtgctgtacgagaatcagaagctgatcgccaaccagttcaacagcgcgatcggcaagatccaggactcactctccagcaccgcaagcgccctggggaagctccaggacgtggtcaaccacaacgcacaggctctgaacaccctcgtcaagcagctgagcagcaagttcggcgccatctcttctgtgctgaatgacatcttcagccggctggatcccccagaggctgaggtccagatcgaccggctgatcactggtcggctgcagagtctgcagacctacgtgactcagcagctgatcagggcagccgagatccgggcctcagccaacctggccgccacgaagatgtcagagtgcgtgctgggccagtccaagagggtggacttctgtgggaagggctaccacctgatgtccttcccacagagcgcccctcacggagtggtgttcctgcacgtcacctacgtgccagcacaggagaagaacttcacaacagctcccgcaatctgccacgacgggaaggcccacttcccccgggagggggtcttcgtgtcaaacggcacccactggttcgtgacacagcgcaacttctacgagccacagatcatcaccactgacaacaccttcgtcagtgggaactgtgacgtggtgatcggcatcgtcaacaacaccgtgtacgacccccttcaacccgaactggatagcttcaaggaggagctggacaagtacttcaagaaccacacctccccagacgtggacctgggcgacattagcggcatcaacgctagtgtcgtcaacatccagaaggagatcgacaggctcaacgaggtggccaaaaacctcaacgagagcctgatcgatctccaggagctggggaagtacgagcagtacatcaagtggccttggtacatctggctcgggttcatcgcagggctgatcgccatcgtgatggtgacaatcatgctgtgctgcatgaccagctgctgcagctgcctgaagggctgctgcagctgcgggagctgttgcaagttcgacgaggacgactcagagcctgtgctcaagggggtgaagctgcactatacttgataattaagtgcttcccacttaaaacatatcaggccttctatttatttaaatatttaaattttatatttattgttgaatgtatggtttgctacctattgtaactattattcttaatcttaaaactataaatatggatcttttatgattctttttgtaagccctaggggctctaaaatggtttcacttatttatcccaaaat

SEQ ID NO: 159 - RNA, 4073 nt, synthetic construct
  source 1..4073: mol_type = other RNA
gttccctatcactctctttaatcactactcacagtaacctcaactcctgccacaatgttcgtgttcctggtgctgctccccctggtcagctcacagtgcgtgaacctgaccactcgcacacagctgcccccagcttacactaactccttcacccgcggggtgtactaccccgacaaggtgttcaggagtagtgtgctgcacagcacccaggacctctttctcccattcttctccaacgtcacgtggttccacgtgatcagcgggacaaatgggacaaagaggttcgacaaccctgtgctgcccttcaacgatggggtgtacttcgcctccatcgagaagagtaacatcatcaggggctggatctttgggaccaccctggactcaaagacccagtccctgctgatcgtgaacaacgccaccaatgtggtcatcaaggtgtgcgagttccagttctgcaacgatccattcctggatcacaaaaacaacaagagctggatggagagtgagttccgggtgtacagcagcgcgaacaactgcacgttcgaatacgtgtcacagccattcctgatggacctggaggggaagcagggcaattttaagaacctgcgcgagttcgtcttcaagaacatcgacgggtattttaagatctactccaagcacacacccatcatcgtcagggagcccgaggatctgccccagggcttctctgccctggagccgctggtggacctccccataggaattaacatcaccaggttccagacactcctggccctgcacaggagctacctgacacctggtgacagttccagtgggtggacggccggggctgcagcctactacgtgggctacctgcagccccggaccttcctgctgaagtacaacgagaatgggaccattacagacgctgtggactgcgcactggatcctctgtccgagaccaagtgtacactgaagagtttcaccgtggagaaggggatctaccagacctccaacttcagggtgcagccgaccgagagcattgtgcgcttcccaaatatcacaaacctgtgccccttcgacgaggtgttcaatgctactcggttcgcttcagtgtacgcttggaatcggaagaggatcagcaactgcgtggcagactacagcgtcctgtacaacctggccccattcttcacattcaagtgctacggcgtctcccccacgaagctgaatgacctgtgcttcaccaacgtgtacgcagacagcttcgtgatccggggagacgaggtccgccagatcgctccagggcagaccggcaacatcgccgactacaactacaagctccctgacgacttcaccgggtgtgtgatcgcttggaacagcaacaagctggacagcaaggtgtccggcaactacaactacctgtaccgcctgtttcgcaagtccaacctgaagcccttcgagcgggatatctccacagagatctaccaggctggcaacaagccctgcaacggcgtggcgggcttcaactgctacttcccactgaggtcttactccttcaggcccacatacggggtggggcaccagccctaccgcgtggtggtgctcagctttgagctcctccacgcccccgccaccgtgtgtgggcccaagaagagtaccaacctggtgaagaacaagtgcgtgaacttcaacttcaacgggctcaaggggaccggcgtcctcaccgagtccaacaagaagttcctgcccttccagcagtttggcagagacatcgccgacactacagacgcggtccgggatccccagaccctggagatcctggacatcacgccctgtagcttcggcggtgtctctgtcatcactcccggtaccaacacatccaaccaggtggcggtgctgtaccagggcgtgaattgcactgaggtgccagtggcaattcacgccgatcagctgacacccacctggcgggtgtacagtaccgggagcaacgtgttccagacacgggcaggatgtctgatcggcgctgagtacgtgaacaacagctacgagtgcgacatccccattggagcgggcatctgcgccagctaccagacccagactaagagccacaggcgggcccgctctgtggcctcacagagcatcatcgcctacactatgagtctgggggctgagaacagcgtggcctactccaacaacagcatcgcaatcccaaccaacttcacaatcagcgtcaccacggagatcctgcccgtgtctatgaccaagacctcagtggactgcacaatgtacatctgcggggacagcaccgagtgttccaacctcctgctccagtacggcagtttctgtacacagctcaaaagggccctgacaggtatagccgtggagcaggacaagaacactcaggaggtgttcgcgcaggtgaagcagatctacaagactcctcccatcaagtactttggagggtttaacttcagccagatcctgcctgaccccagcaaaccctccaagaggagcttcatcgaggatctgctctttaacaaagtcaccctcgccgacgcagggttcattaagcagtacggtgactgtctgggagatatcgccgctcgggatctcatctgtgcgcagaagttcaagggactgaccgtcctgccacccctgctcacggatgagatgatcgcccagtacaccagcgccctgctggctgggacgatcacttcaggttggactttcggggcaggcgccgccctgcagatccccttcgccatgcagatggcctacaggttcaacgggatcggcgtgacacagaatgtgctgtacgagaatcagaagctgatcgccaaccagttcaacagcgcgatcggcaagatccaggactcactctccagcaccgcaagcgccctggggaagctccaggacgtggtcaaccacaacgcacaggctctgaacaccctcgtcaagcagctgagcagcaagttcggcgccatctcttctgtgctgaatgacatcttcagccggctggatcccccagaggctgaggtccagatcgaccggctgatcactggtcggctgcagagtctgcagacctacgtgactcagcagctgatcagggcagccgagatccgggcctcagccaacctggccgccacgaagatgtcagagtgcgtgctgggccagtccaagagggtggacttctgtgggaagggctaccacctgatgtccttcccacagagcgcccctcacggagtggtgttcctgcacgtcacctacgtgccagcacaggagaagaacttcacaacagctcccgcaatctgccacgacgggaaggcccacttcccccgggagggggtcttcgtgtcaaacggcacccactggttcgtgacacagcgcaacttctacgagccacagatcatcaccactgacaacaccttcgtcagtgggaactgtgacgtggtgatcggcatcgtcaacaacaccgtgtacgacccccttcaacccgaactggatagcttcaaggaggagctggacaagtacttcaagaaccacacctccccagacgtggacctgggcgacattagcggcatcaacgctagtgtcgtcaacatccagaaggagatcgacaggctcaacgaggtggccaaaaacctcaacgagagcctgatcgatctccaggagctggggaagtacgagcagtacatcaagtggccttggtacatctggctcgggttcatcgcagggctgatcgccatcgtgatggtgacaatcatgctgtgctgcatgaccagctgctgcagctgcctgaagggctgctgcagctgcgggagctgttgcaagttcgacgaggacgactcagagcctgtgctcaagggggtgaagctgcactatacttgataatctagattaagtgcttcccacttaaaacatatcaggccttctatttatttaaatatttaaattttatatttattgttgaatgtatggtttgctacctattgtaactattattcttaatcttaaaactataaatatggatcttttatgattctttttgtaagccctaggggctctaaaatggtttcacttatttatcccaaaat

SEQ ID NO: 160 - RNA, 4077 nt, synthetic construct
  source 1..4077: mol_type = other RNA
aggagttccctatcactctctttaatcactactcacagtaacctcaactcctgccacaatgttcgtgttcctggtgctgctccccctggtcagctcacagtgcgtgaacctgaccactcgcacacagctgcccccagcttacactaactccttcacccgcggggtgtactaccccgacaaggtgttcaggagtagtgtgctgcacagcacccaggacctctttctcccattcttctccaacgtcacgtggttccacgtgatcagcgggacaaatgggacaaagaggttcgacaaccctgtgctgcccttcaacgatggggtgtacttcgcctccatcgagaagagtaacatcatcaggggctggatctttgggaccaccctggactcaaagacccagtccctgctgatcgtgaacaacgccaccaatgtggtcatcaaggtgtgcgagttccagttctgcaacgatccattcctggatcacaaaaacaacaagagctggatggagagtgagttccgggtgtacagcagcgcgaacaactgcacgttcgaatacgtgtcacagccattcctgatggacctggaggggaagcagggcaattttaagaacctgcgcgagttcgtcttcaagaacatcgacgggtattttaagatctactccaagcacacacccatcatcgtcagggagcccgaggatctgccccagggcttctctgccctggagccgctggtggacctccccataggaattaacatcaccaggttccagacactcctggccctgcacaggagctacctgacacctggtgacagttccagtgggtggacggccggggctgcagcctactacgtgggctacctgcagccccggaccttcctgctgaagtacaacgagaatgggaccattacagacgctgtggactgcgcactggatcctctgtccgagaccaagtgtacactgaagagtttcaccgtggagaaggggatctaccagacctccaacttcagggtgcagccgaccgagagcattgtgcgcttcccaaatatcacaaacctgtgccccttcgacgaggtgttcaatgctactcggttcgcttcagtgtacgcttggaatcggaagaggatcagcaactgcgtggcagactacagcgtcctgtacaacctggccccattcttcacattcaagtgctacggcgtctcccccacgaagctgaatgacctgtgcttcaccaacgtgtacgcagacagcttcgtgatccggggagacgaggtccgccagatcgctccagggcagaccggcaacatcgccgactacaactacaagctccctgacgacttcaccgggtgtgtgatcgcttggaacagcaacaagctggacagcaaggtgtccggcaactacaactacctgtaccgcctgtttcgcaagtccaacctgaagcccttcgagcgggatatctccacagagatctaccaggctggcaacaagccctgcaacggcgtggcgggcttcaactgctacttcccactgaggtcttactccttcaggcccacatacggggtggggcaccagccctaccgcgtggtggtgctcagctttgagctcctccacgcccccgccaccgtgtgtgggcccaagaagagtaccaacctggtgaagaacaagtgcgtgaacttcaacttcaacgggctcaaggggaccggcgtcctcaccgagtccaacaagaagttcctgcccttccagcagtttggcagagacatcgccgacactacagacgcggtccgggatccccagaccctggagatcctggacatcacgccctgtagcttcggcggtgtctctgtcatcactcccggtaccaacacatccaaccaggtggcggtgctgtaccagggcgtgaattgcactgaggtgccagtggcaattcacgccgatcagctgacacccacctggcgggtgtacagtaccgggagcaacgtgttccagacacgggcaggatgtctgatcggcgctgagtacgtgaacaacagctacgagtgcgacatccccattggagcgggcatctgcgccagctaccagacccagactaagagccacaggcgggcccgctctgtggcctcacagagcatcatcgcctacactatgagtctgggggctgagaacagcgtggcctactccaacaacagcatcgcaatcccaaccaacttcacaatcagcgtcaccacggagatcctgcccgtgtctatgaccaagacctcagtggactgcacaatgtacatctgcggggacagcaccgagtgttccaacctcctgctccagtacggcagtttctgtacacagctcaaaagggccctgacaggtatagccgtggagcaggacaagaacactcaggaggtgttcgcgcaggtgaagcagatctacaagactcctcccatcaagtactttggagggtttaacttcagccagatcctgcctgaccccagcaaaccctccaagaggagcttcatcgaggatctgctctttaacaaagtcaccctcgccgacgcagggttcattaagcagtacggtgactgtctgggagatatcgccgctcgggatctcatctgtgcgcagaagttcaagggactgaccgtcctgccacccctgctcacggatgagatgatcgcccagtacaccagcgccctgctggctgggacgatcacttcaggttggactttcggggcaggcgccgccctgcagatccccttcgccatgcagatggcctacaggttcaacgggatcggcgtgacacagaatgtgctgtacgagaatcagaagctgatcgccaaccagttcaacagcgcgatcggcaagatccaggactcactctccagcaccgcaagcgccctggggaagctccaggacgtggtcaaccacaacgcacaggctctgaacaccctcgtcaagcagctgagcagcaagttcggcgccatctcttctgtgctgaatgacatcttcagccggctggatcccccagaggctgaggtccagatcgaccggctgatcactggtcggctgcagagtctgcagacctacgtgactcagcagctgatcagggcagccgagatccgggcctcagccaacctggccgccacgaagatgtcagagtgcgtgctgggccagtccaagagggtggacttctgtgggaagggctaccacctgatgtccttcccacagagcgcccctcacggagtggtgttcctgcacgtcacctacgtgccagcacaggagaagaacttcacaacagctcccgcaatctgccacgacgggaaggcccacttcccccgggagggggtcttcgtgtcaaacggcacccactggttcgtgacacagcgcaacttctacgagccacagatcatcaccactgacaacaccttcgtcagtgggaactgtgacgtggtgatcggcatcgtcaacaacaccgtgtacgacccccttcaacccgaactggatagcttcaaggaggagctggacaagtacttcaagaaccacacctccccagacgtggacctgggcgacattagcggcatcaacgctagtgtcgtcaacatccagaaggagatcgacaggctcaacgaggtggccaaaaacctcaacgagagcctgatcgatctccaggagctggggaagtacgagcagtacatcaagtggccttggtacatctggctcgggttcatcgcagggctgatcgccatcgtgatggtgacaatcatgctgtgctgcatgaccagctgctgcagctgcctgaagggctgctgcagctgcgggagctgttgcaagttcgacgaggacgactcagagcctgtgctcaagggggtgaagctgcactatacttgataatctagattaagtgcttcccacttaaaacatatcaggccttctatttatttaaatatttaaattttatatttattgttgaatgtatggtttgctacctattgtaactattattcttaatcttaaaactataaatatggatcttttatgattctttttgtaagccctaggggctctaaaatggtttcacttatttatcccaaaat

SEQ ID NO: 161 - RNA, 4213 nt, synthetic construct
  source 1..4213: mol_type = other RNA
aggagttccctatcactctctttaatcactactcacagtaacctcaactcctgccacaatgttcgtgttcctggtgctgctccccctggtcagctcacagtgcgtgaacctgaccactcgcacacagctgcccccagcttacactaactccttcacccgcggggtgtactaccccgacaaggtgttcaggagtagtgtgctgcacagcacccaggacctctttctcccattcttctccaacgtcacgtggttccacgtgatcagcgggacaaatgggacaaagaggttcgacaaccctgtgctgcccttcaacgatggggtgtacttcgcctccatcgagaagagtaacatcatcaggggctggatctttgggaccaccctggactcaaagacccagtccctgctgatcgtgaacaacgccaccaatgtggtcatcaaggtgtgcgagttccagttctgcaacgatccattcctggatcacaaaaacaacaagagctggatggagagtgagttccgggtgtacagcagcgcgaacaactgcacgttcgaatacgtgtcacagccattcctgatggacctggaggggaagcagggcaattttaagaacctgcgcgagttcgtcttcaagaacatcgacgggtattttaagatctactccaagcacacacccatcatcgtcagggagcccgaggatctgccccagggcttctctgccctggagccgctggtggacctccccataggaattaacatcaccaggttccagacactcctggccctgcacaggagctacctgacacctggtgacagttccagtgggtggacggccggggctgcagcctactacgtgggctacctgcagccccggaccttcctgctgaagtacaacgagaatgggaccattacagacgctgtggactgcgcactggatcctctgtccgagaccaagtgtacactgaagagtttcaccgtggagaaggggatctaccagacctccaacttcagggtgcagccgaccgagagcattgtgcgcttcccaaatatcacaaacctgtgccccttcgacgaggtgttcaatgctactcggttcgcttcagtgtacgcttggaatcggaagaggatcagcaactgcgtggcagactacagcgtcctgtacaacctggccccattcttcacattcaagtgctacggcgtctcccccacgaagctgaatgacctgtgcttcaccaacgtgtacgcagacagcttcgtgatccggggagacgaggtccgccagatcgctccagggcagaccggcaacatcgccgactacaactacaagctccctgacgacttcaccgggtgtgtgatcgcttggaacagcaacaagctggacagcaaggtgtccggcaactacaactacctgtaccgcctgtttcgcaagtccaacctgaagcccttcgagcgggatatctccacagagatctaccaggctggcaacaagccctgcaacggcgtggcgggcttcaactgctacttcccactgaggtcttactccttcaggcccacatacggggtggggcaccagccctaccgcgtggtggtgctcagctttgagctcctccacgcccccgccaccgtgtgtgggcccaagaagagtaccaacctggtgaagaacaagtgcgtgaacttcaacttcaacgggctcaaggggaccggcgtcctcaccgagtccaacaagaagttcctgcccttccagcagtttggcagagacatcgccgacactacagacgcggtccgggatccccagaccctggagatcctggacatcacgccctgtagcttcggcggtgtctctgtcatcactcccggtaccaacacatccaaccaggtggcggtgctgtaccagggcgtgaattgcactgaggtgccagtggcaattcacgccgatcagctgacacccacctggcgggtgtacagtaccgggagcaacgtgttccagacacgggcaggatgtctgatcggcgctgagtacgtgaacaacagctacgagtgcgacatccccattggagcgggcatctgcgccagctaccagacccagactaagagccacaggcgggcccgctctgtggcctcacagagcatcatcgcctacactatgagtctgggggctgagaacagcgtggcctactccaacaacagcatcgcaatcccaaccaacttcacaatcagcgtcaccacggagatcctgcccgtgtctatgaccaagacctcagtggactgcacaatgtacatctgcggggacagcaccgagtgttccaacctcctgctccagtacggcagtttctgtacacagctcaaaagggccctgacaggtatagccgtggagcaggacaagaacactcaggaggtgttcgcgcaggtgaagcagatctacaagactcctcccatcaagtactttggagggtttaacttcagccagatcctgcctgaccccagcaaaccctccaagaggagcttcatcgaggatctgctctttaacaaagtcaccctcgccgacgcagggttcattaagcagtacggtgactgtctgggagatatcgccgctcgggatctcatctgtgcgcagaagttcaagggactgaccgtcctgccacccctgctcacggatgagatgatcgcccagtacaccagcgccctgctggctgggacgatcacttcaggttggactttcggggcaggcgccgccctgcagatccccttcgccatgcagatggcctacaggttcaacgggatcggcgtgacacagaatgtgctgtacgagaatcagaagctgatcgccaaccagttcaacagcgcgatcggcaagatccaggactcactctccagcaccgcaagcgccctggggaagctccaggacgtggtcaaccacaacgcacaggctctgaacaccctcgtcaagcagctgagcagcaagttcggcgccatctcttctgtgctgaatgacatcttcagccggctggatcccccagaggctgaggtccagatcgaccggctgatcactggtcggctgcagagtctgcagacctacgtgactcagcagctgatcagggcagccgagatccgggcctcagccaacctggccgccacgaagatgtcagagtgcgtgctgggccagtccaagagggtggacttctgtgggaagggctaccacctgatgtccttcccacagagcgcccctcacggagtggtgttcctgcacgtcacctacgtgccagcacaggagaagaacttcacaacagctcccgcaatctgccacgacgggaaggcccacttcccccgggagggggtcttcgtgtcaaacggcacccactggttcgtgacacagcgcaacttctacgagccacagatcatcaccactgacaacaccttcgtcagtgggaactgtgacgtggtgatcggcatcgtcaacaacaccgtgtacgacccccttcaacccgaactggatagcttcaaggaggagctggacaagtacttcaagaaccacacctccccagacgtggacctgggcgacattagcggcatcaacgctagtgtcgtcaacatccagaaggagatcgacaggctcaacgaggtggccaaaaacctcaacgagagcctgatcgatctccaggagctggggaagtacgagcagtacatcaagtggccttggtacatctggctcgggttcatcgcagggctgatcgccatcgtgatggtgacaatcatgctgtgctgcatgaccagctgctgcagctgcctgaagggctgctgcagctgcgggagctgttgcaagttcgacgaggacgactcagagcctgtgctcaagggggtgaagctgcactatacttgataatctagattaagtgcttcccacttaaaacatatcaggccttctatttatttaaatatttaaattttatatttattgttgaatgtatggtttgctacctattgtaactattattcttaatcttaaaactataaatatggatcttttatgattctttttgtaagccctaggggctctaaaatggtttcacttatttatcccaaaatttcattgcaaaaaaaaaaaaaaaaaaaaaaaaaaaaaagcatatgactaaaaaaaaaaaaaaaaaaaaaaaaaaaaaaaaaaaaaaaaaaaaaaaaaaaaaaaaaaaaaaaaaaaaaaaaaaaaaaaaaaaaaaaa

SEQ ID NO: 162 - RNA, 4067 nt, synthetic construct
  source 1..4067: mol_type = other RNA
gttccctatcactctctttaatcactactcacagtaacctcaactcctgccacaatgttcgtgttcctggtgctgcttccgctggtcagcagccagtgcgtgaacctgaccacgcggacgcagctgccacccgcgtacaccaatagcttcactcggggggtctactacccggacaaggtcttccggagcagcgtgctgcacagcacgcaggacctcttcctgccgttcttctcgaacgtcacgtggttccacgtgatcagcgggacgaacggcacgaagaggttcgacaaccccgtgctcccgttcaatgacggggtgtatttcgccagcatcgagaagagtaacatcattcgggggtggatcttcggcactaccttggactccaagacgcagagcctgctcatcgtgaacaacgccaccaacgtggtgatcaaggtctgcgagttccagttctgcaacgaccccttcttggaccacaagaacaacaagagctggatggagtccgagttcagagtctacagcagcgccaacaattgcaccttcgaatacgtgagccagccgttcctgatggacctggaaggcaagcagggcaacttcaagaacttgcgcgagtttgtcttcaagaacatcgacggctacttcaagatctacagcaagcacacccccatcattgtgcgggagccggaggacctgccgcagggcttcagcgctctggagccgctggtggacctgcccatcggcatcaacatcacgcggttccagacgctgttggccctgcacaggtcctacctgactccgggagactccagctccgggtggacggccggggctgcagcctactatgtgggctacctgcagccccggaccttcttgttgaagtacaacgagaacggcacgatcacggacgccgtggattgtgccttggaccccctgagcgagaccaagtgtaccctgaagtccttcaccgtggagaaggggatctaccagacctccaacttccgggtccagccgactgagagcatcgtgcggtttcccaacattaccaacttgtgccccttcgatgaggtgttcaacgccacgcggttcgccagcgtgtacgcctggaacaggaagcgcatcagcaactgcgtggccgactactcagtgttgtacaacctcgccccgttcttcaccttcaagtgctacggggtgagccctacaaagctgaacgacctctgcttcaccaacgtgtacgccgacagctttgtgattcgcggcgacgaggtccggcagatcgccccagggcagaccggcaatatcgctgactacaactacaagctgcctgacgatttcaccgggtgcgtgatcgcctggaacagcaacaagctggacagcaaggtgtcagggaactacaattacctgtaccggttgttcaggaagagtaacctgaagccgttcgagcgtgacatcagcaccgagatctaccaggccggcaacaagccctgcaacggggtggcgggattcaactgctactttccgttgcgctcctattcctttcggcccacctacggggtgggccaccagccctacagggtggtggtgctctccttcgagctgctccacgcaccggccacggtgtgtgggccgaagaagagtaccaacctggtgaagaataagtgcgtcaacttcaacttcaacgggctgaaaggaacaggagtgctgacggagagcaacaagaaattcctgccattccagcagttcgggcgcgacatcgctgacaccaccgacgctgtgcgggacccccagaccctggagatcctggacatcaccccttgcagcttcggcggcgtcagcgtgatcacgcccgggaccaacacatccaaccaggtggccgtgctgtaccagggcgtgaactgcaccgaggtgccggtggccatccacgccgatcagctgacgcccacctggcgggtgtactccacgggcagcaacgtcttccagacacgcgccggctgcttgatcggagccgagtacgtcaataacagctacgagtgcgacattcccatcggggccgggatctgcgccagctaccagacgcagaccaagtcccaccggcgcgctcggagcgtggcctcccagagcatcatcgcctacacgatgagcctgggggccgagaacagcgtcgcttatagcaacaacagcatcgctatccccaccaactttacaattagcgtgaccacggagatcttgcccgtcagcatgaccaagacctccgtggactgcaccatgtacatctgcggggatagcaccgagtgctccaacctgctcctgcagtacgggtccttctgcacgcagttgaagcgcgcattgaccggcatcgcagtggagcaggacaagaacacgcaggaggtgtttgctcaggtcaagcagatctacaagacgcccccgatcaagtacttcgggggcttcaacttcagccagatcctgcctgacccgagcaagccctccaagcgtagcttcatcgaggacctgctgttcaataaagtgacgctggcagacgccggcttcatcaagcagtacggcgactgtctgggggacatcgctgcccgggacctcatctgtgcccagaagttcaagggcctcacggtcctgccgcccctgctcacagatgagatgatcgcccagtacacgagcgccctgctcgctgggaccatcaccagcgggtggacgttcggcgcgggcgctgcattacagatccccttcgcgatgcagatggcctacagatttaacggtatcggcgtcacgcagaacgtgctgtacgagaaccagaagctgatcgccaaccagttcaacagcgccatcgggaagatccaggacagcttgagcagcaccgcctctgccctggggaagctgcaggacgtcgtgaatcacaatgcccaggccttgaacacgttggtgaagcagctctcatcgaagttcggcgccatcagcagcgtgctgaacgacatcttcagtcggctggaccccccggaggcggaggtccagatcgaccgcctgatcacggggaggctgcagagcttgcagacgtacgtgactcagcagctcatcagggctgctgagatccgggcgtctgccaacctggctgccaccaagatgtccgaatgcgtcttggggcagtccaagcgggtggacttctgcgggaagggctaccacctgatgtccttcccgcagagcgcaccccacggggtggtgttcctgcacgtcacctacgtgccggctcaggagaagaacttcaccacagctcccgcaatctgccacgacgggaaggcccacttcccccgggaaggggtcttcgtgtcgaacggcacccactggttcgtcacgcagcgcaacttctacgagccacagatcatcaccactgacaacaccttcgtcagtgggaactgcgacgtggtcatcgggatcgtcaacaacacggtgtacgatcccctgcagcccgagctggatagcttcaaggaggagctggacaagtacttcaagaaccacacttccccggatgtggacctcggggacatcagcggaatcaacgcctccgtggtcaacatccagaaggagatcgacaggctcaacgaggtggcaaagaacctcaacgagagcctgatcgatctccaggagctggggaagtatgagcagtacatcaagtggccctggtacatctggctcgggttcatcgcagggttgatcgccatcgtgatggtgacgatcatgttgtgctgcatgacgagctgctgcagctgcctgaagggctgctgcagctgcgggagctgctgtaagttcgacgaggacgattccgagccggtgctgaagggcgtgaagctgcactacacctgataattaagtgcttcccacttaaaacatatcaggccttctatttatttaaatatttaaattttatatttattgttgaatgtatggtttgctacctattgtaactattattcttaatcttaaaactataaatatggatcttttatgattctttttgtaagccctaggggctctaaaatggtttcacttatttatcccaaaat

SEQ ID NO: 163 - RNA, 4073 nt, synthetic construct
  source 1..4073: mol_type = other RNA
gttccctatcactctctttaatcactactcacagtaacctcaactcctgccacaatgttcgtgttcctggtgctgcttccgctggtcagcagccagtgcgtgaacctgaccacgcggacgcagctgccacccgcgtacaccaatagcttcactcggggggtctactacccggacaaggtcttccggagcagcgtgctgcacagcacgcaggacctcttcctgccgttcttctcgaacgtcacgtggttccacgtgatcagcgggacgaacggcacgaagaggttcgacaaccccgtgctcccgttcaatgacggggtgtatttcgccagcatcgagaagagtaacatcattcgggggtggatcttcggcactaccttggactccaagacgcagagcctgctcatcgtgaacaacgccaccaacgtggtgatcaaggtctgcgagttccagttctgcaacgaccccttcttggaccacaagaacaacaagagctggatggagtccgagttcagagtctacagcagcgccaacaattgcaccttcgaatacgtgagccagccgttcctgatggacctggaaggcaagcagggcaacttcaagaacttgcgcgagtttgtcttcaagaacatcgacggctacttcaagatctacagcaagcacacccccatcattgtgcgggagccggaggacctgccgcagggcttcagcgctctggagccgctggtggacctgcccatcggcatcaacatcacgcggttccagacgctgttggccctgcacaggtcctacctgactccgggagactccagctccgggtggacggccggggctgcagcctactatgtgggctacctgcagccccggaccttcttgttgaagtacaacgagaacggcacgatcacggacgccgtggattgtgccttggaccccctgagcgagaccaagtgtaccctgaagtccttcaccgtggagaaggggatctaccagacctccaacttccgggtccagccgactgagagcatcgtgcggtttcccaacattaccaacttgtgccccttcgatgaggtgttcaacgccacgcggttcgccagcgtgtacgcctggaacaggaagcgcatcagcaactgcgtggccgactactcagtgttgtacaacctcgccccgttcttcaccttcaagtgctacggggtgagccctacaaagctgaacgacctctgcttcaccaacgtgtacgccgacagctttgtgattcgcggcgacgaggtccggcagatcgccccagggcagaccggcaatatcgctgactacaactacaagctgcctgacgatttcaccgggtgcgtgatcgcctggaacagcaacaagctggacagcaaggtgtcagggaactacaattacctgtaccggttgttcaggaagagtaacctgaagccgttcgagcgtgacatcagcaccgagatctaccaggccggcaacaagccctgcaacggggtggcgggattcaactgctactttccgttgcgctcctattcctttcggcccacctacggggtgggccaccagccctacagggtggtggtgctctccttcgagctgctccacgcaccggccacggtgtgtgggccgaagaagagtaccaacctggtgaagaataagtgcgtcaacttcaacttcaacgggctgaaaggaacaggagtgctgacggagagcaacaagaaattcctgccattccagcagttcgggcgcgacatcgctgacaccaccgacgctgtgcgggacccccagaccctggagatcctggacatcaccccttgcagcttcggcggcgtcagcgtgatcacgcccgggaccaacacatccaaccaggtggccgtgctgtaccagggcgtgaactgcaccgaggtgccggtggccatccacgccgatcagctgacgcccacctggcgggtgtactccacgggcagcaacgtcttccagacacgcgccggctgcttgatcggagccgagtacgtcaataacagctacgagtgcgacattcccatcggggccgggatctgcgccagctaccagacgcagaccaagtcccaccggcgcgctcggagcgtggcctcccagagcatcatcgcctacacgatgagcctgggggccgagaacagcgtcgcttatagcaacaacagcatcgctatccccaccaactttacaattagcgtgaccacggagatcttgcccgtcagcatgaccaagacctccgtggactgcaccatgtacatctgcggggatagcaccgagtgctccaacctgctcctgcagtacgggtccttctgcacgcagttgaagcgcgcattgaccggcatcgcagtggagcaggacaagaacacgcaggaggtgtttgctcaggtcaagcagatctacaagacgcccccgatcaagtacttcgggggcttcaacttcagccagatcctgcctgacccgagcaagccctccaagcgtagcttcatcgaggacctgctgttcaataaagtgacgctggcagacgccggcttcatcaagcagtacggcgactgtctgggggacatcgctgcccgggacctcatctgtgcccagaagttcaagggcctcacggtcctgccgcccctgctcacagatgagatgatcgcccagtacacgagcgccctgctcgctgggaccatcaccagcgggtggacgttcggcgcgggcgctgcattacagatccccttcgcgatgcagatggcctacagatttaacggtatcggcgtcacgcagaacgtgctgtacgagaaccagaagctgatcgccaaccagttcaacagcgccatcgggaagatccaggacagcttgagcagcaccgcctctgccctggggaagctgcaggacgtcgtgaatcacaatgcccaggccttgaacacgttggtgaagcagctctcatcgaagttcggcgccatcagcagcgtgctgaacgacatcttcagtcggctggaccccccggaggcggaggtccagatcgaccgcctgatcacggggaggctgcagagcttgcagacgtacgtgactcagcagctcatcagggctgctgagatccgggcgtctgccaacctggctgccaccaagatgtccgaatgcgtcttggggcagtccaagcgggtggacttctgcgggaagggctaccacctgatgtccttcccgcagagcgcaccccacggggtggtgttcctgcacgtcacctacgtgccggctcaggagaagaacttcaccacagctcccgcaatctgccacgacgggaaggcccacttcccccgggaaggggtcttcgtgtcgaacggcacccactggttcgtcacgcagcgcaacttctacgagccacagatcatcaccactgacaacaccttcgtcagtgggaactgcgacgtggtcatcgggatcgtcaacaacacggtgtacgatcccctgcagcccgagctggatagcttcaaggaggagctggacaagtacttcaagaaccacacttccccggatgtggacctcggggacatcagcggaatcaacgcctccgtggtcaacatccagaaggagatcgacaggctcaacgaggtggcaaagaacctcaacgagagcctgatcgatctccaggagctggggaagtatgagcagtacatcaagtggccctggtacatctggctcgggttcatcgcagggttgatcgccatcgtgatggtgacgatcatgttgtgctgcatgacgagctgctgcagctgcctgaagggctgctgcagctgcgggagctgctgtaagttcgacgaggacgattccgagccggtgctgaagggcgtgaagctgcactacacctgataatctagattaagtgcttcccacttaaaacatatcaggccttctatttatttaaatatttaaattttatatttattgttgaatgtatggtttgctacctattgtaactattattcttaatcttaaaactataaatatggatcttttatgattctttttgtaagccctaggggctctaaaatggtttcacttatttatcccaaaat

SEQ ID NO: 164 - RNA, 4077 nt, synthetic construct
  source 1..4077: mol_type = other RNA
aggagttccctatcactctctttaatcactactcacagtaacctcaactcctgccacaatgttcgtgttcctggtgctgcttccgctggtcagcagccagtgcgtgaacctgaccacgcggacgcagctgccacccgcgtacaccaatagcttcactcggggggtctactacccggacaaggtcttccggagcagcgtgctgcacagcacgcaggacctcttcctgccgttcttctcgaacgtcacgtggttccacgtgatcagcgggacgaacggcacgaagaggttcgacaaccccgtgctcccgttcaatgacggggtgtatttcgccagcatcgagaagagtaacatcattcgggggtggatcttcggcactaccttggactccaagacgcagagcctgctcatcgtgaacaacgccaccaacgtggtgatcaaggtctgcgagttccagttctgcaacgaccccttcttggaccacaagaacaacaagagctggatggagtccgagttcagagtctacagcagcgccaacaattgcaccttcgaatacgtgagccagccgttcctgatggacctggaaggcaagcagggcaacttcaagaacttgcgcgagtttgtcttcaagaacatcgacggctacttcaagatctacagcaagcacacccccatcattgtgcgggagccggaggacctgccgcagggcttcagcgctctggagccgctggtggacctgcccatcggcatcaacatcacgcggttccagacgctgttggccctgcacaggtcctacctgactccgggagactccagctccgggtggacggccggggctgcagcctactatgtgggctacctgcagccccggaccttcttgttgaagtacaacgagaacggcacgatcacggacgccgtggattgtgccttggaccccctgagcgagaccaagtgtaccctgaagtccttcaccgtggagaaggggatctaccagacctccaacttccgggtccagccgactgagagcatcgtgcggtttcccaacattaccaacttgtgccccttcgatgaggtgttcaacgccacgcggttcgccagcgtgtacgcctggaacaggaagcgcatcagcaactgcgtggccgactactcagtgttgtacaacctcgccccgttcttcaccttcaagtgctacggggtgagccctacaaagctgaacgacctctgcttcaccaacgtgtacgccgacagctttgtgattcgcggcgacgaggtccggcagatcgccccagggcagaccggcaatatcgctgactacaactacaagctgcctgacgatttcaccgggtgcgtgatcgcctggaacagcaacaagctggacagcaaggtgtcagggaactacaattacctgtaccggttgttcaggaagagtaacctgaagccgttcgagcgtgacatcagcaccgagatctaccaggccggcaacaagccctgcaacggggtggcgggattcaactgctactttccgttgcgctcctattcctttcggcccacctacggggtgggccaccagccctacagggtggtggtgctctccttcgagctgctccacgcaccggccacggtgtgtgggccgaagaagagtaccaacctggtgaagaataagtgcgtcaacttcaacttcaacgggctgaaaggaacaggagtgctgacggagagcaacaagaaattcctgccattccagcagttcgggcgcgacatcgctgacaccaccgacgctgtgcgggacccccagaccctggagatcctggacatcaccccttgcagcttcggcggcgtcagcgtgatcacgcccgggaccaacacatccaaccaggtggccgtgctgtaccagggcgtgaactgcaccgaggtgccggtggccatccacgccgatcagctgacgcccacctggcgggtgtactccacgggcagcaacgtcttccagacacgcgccggctgcttgatcggagccgagtacgtcaataacagctacgagtgcgacattcccatcggggccgggatctgcgccagctaccagacgcagaccaagtcccaccggcgcgctcggagcgtggcctcccagagcatcatcgcctacacgatgagcctgggggccgagaacagcgtcgcttatagcaacaacagcatcgctatccccaccaactttacaattagcgtgaccacggagatcttgcccgtcagcatgaccaagacctccgtggactgcaccatgtacatctgcggggatagcaccgagtgctccaacctgctcctgcagtacgggtccttctgcacgcagttgaagcgcgcattgaccggcatcgcagtggagcaggacaagaacacgcaggaggtgtttgctcaggtcaagcagatctacaagacgcccccgatcaagtacttcgggggcttcaacttcagccagatcctgcctgacccgagcaagccctccaagcgtagcttcatcgaggacctgctgttcaataaagtgacgctggcagacgccggcttcatcaagcagtacggcgactgtctgggggacatcgctgcccgggacctcatctgtgcccagaagttcaagggcctcacggtcctgccgcccctgctcacagatgagatgatcgcccagtacacgagcgccctgctcgctgggaccatcaccagcgggtggacgttcggcgcgggcgctgcattacagatccccttcgcgatgcagatggcctacagatttaacggtatcggcgtcacgcagaacgtgctgtacgagaaccagaagctgatcgccaaccagttcaacagcgccatcgggaagatccaggacagcttgagcagcaccgcctctgccctggggaagctgcaggacgtcgtgaatcacaatgcccaggccttgaacacgttggtgaagcagctctcatcgaagttcggcgccatcagcagcgtgctgaacgacatcttcagtcggctggaccccccggaggcggaggtccagatcgaccgcctgatcacggggaggctgcagagcttgcagacgtacgtgactcagcagctcatcagggctgctgagatccgggcgtctgccaacctggctgccaccaagatgtccgaatgcgtcttggggcagtccaagcgggtggacttctgcgggaagggctaccacctgatgtccttcccgcagagcgcaccccacggggtggtgttcctgcacgtcacctacgtgccggctcaggagaagaacttcaccacagctcccgcaatctgccacgacgggaaggcccacttcccccgggaaggggtcttcgtgtcgaacggcacccactggttcgtcacgcagcgcaacttctacgagccacagatcatcaccactgacaacaccttcgtcagtgggaactgcgacgtggtcatcgggatcgtcaacaacacggtgtacgatcccctgcagcccgagctggatagcttcaaggaggagctggacaagtacttcaagaaccacacttccccggatgtggacctcggggacatcagcggaatcaacgcctccgtggtcaacatccagaaggagatcgacaggctcaacgaggtggcaaagaacctcaacgagagcctgatcgatctccaggagctggggaagtatgagcagtacatcaagtggccctggtacatctggctcgggttcatcgcagggttgatcgccatcgtgatggtgacgatcatgttgtgctgcatgacgagctgctgcagctgcctgaagggctgctgcagctgcgggagctgctgtaagttcgacgaggacgattccgagccggtgctgaagggcgtgaagctgcactacacctgataatctagattaagtgcttcccacttaaaacatatcaggccttctatttatttaaatatttaaattttatatttattgttgaatgtatggtttgctacctattgtaactattattcttaatcttaaaactataaatatggatcttttatgattctttttgtaagccctaggggctctaaaatggtttcacttatttatcccaaaat

SEQ ID NO: 165 - RNA, 4213 nt, synthetic construct
  source 1..4213: mol_type = other RNA
aggagttccctatcactctctttaatcactactcacagtaacctcaactcctgccacaatgttcgtgttcctggtgctgcttccgctggtcagcagccagtgcgtgaacctgaccacgcggacgcagctgccacccgcgtacaccaatagcttcactcggggggtctactacccggacaaggtcttccggagcagcgtgctgcacagcacgcaggacctcttcctgccgttcttctcgaacgtcacgtggttccacgtgatcagcgggacgaacggcacgaagaggttcgacaaccccgtgctcccgttcaatgacggggtgtatttcgccagcatcgagaagagtaacatcattcgggggtggatcttcggcactaccttggactccaagacgcagagcctgctcatcgtgaacaacgccaccaacgtggtgatcaaggtctgcgagttccagttctgcaacgaccccttcttggaccacaagaacaacaagagctggatggagtccgagttcagagtctacagcagcgccaacaattgcaccttcgaatacgtgagccagccgttcctgatggacctggaaggcaagcagggcaacttcaagaacttgcgcgagtttgtcttcaagaacatcgacggctacttcaagatctacagcaagcacacccccatcattgtgcgggagccggaggacctgccgcagggcttcagcgctctggagccgctggtggacctgcccatcggcatcaacatcacgcggttccagacgctgttggccctgcacaggtcctacctgactccgggagactccagctccgggtggacggccggggctgcagcctactatgtgggctacctgcagccccggaccttcttgttgaagtacaacgagaacggcacgatcacggacgccgtggattgtgccttggaccccctgagcgagaccaagtgtaccctgaagtccttcaccgtggagaaggggatctaccagacctccaacttccgggtccagccgactgagagcatcgtgcggtttcccaacattaccaacttgtgccccttcgatgaggtgttcaacgccacgcggttcgccagcgtgtacgcctggaacaggaagcgcatcagcaactgcgtggccgactactcagtgttgtacaacctcgccccgttcttcaccttcaagtgctacggggtgagccctacaaagctgaacgacctctgcttcaccaacgtgtacgccgacagctttgtgattcgcggcgacgaggtccggcagatcgccccagggcagaccggcaatatcgctgactacaactacaagctgcctgacgatttcaccgggtgcgtgatcgcctggaacagcaacaagctggacagcaaggtgtcagggaactacaattacctgtaccggttgttcaggaagagtaacctgaagccgttcgagcgtgacatcagcaccgagatctaccaggccggcaacaagccctgcaacggggtggcgggattcaactgctactttccgttgcgctcctattcctttcggcccacctacggggtgggccaccagccctacagggtggtggtgctctccttcgagctgctccacgcaccggccacggtgtgtgggccgaagaagagtaccaacctggtgaagaataagtgcgtcaacttcaacttcaacgggctgaaaggaacaggagtgctgacggagagcaacaagaaattcctgccattccagcagttcgggcgcgacatcgctgacaccaccgacgctgtgcgggacccccagaccctggagatcctggacatcaccccttgcagcttcggcggcgtcagcgtgatcacgcccgggaccaacacatccaaccaggtggccgtgctgtaccagggcgtgaactgcaccgaggtgccggtggccatccacgccgatcagctgacgcccacctggcgggtgtactccacgggcagcaacgtcttccagacacgcgccggctgcttgatcggagccgagtacgtcaataacagctacgagtgcgacattcccatcggggccgggatctgcgccagctaccagacgcagaccaagtcccaccggcgcgctcggagcgtggcctcccagagcatcatcgcctacacgatgagcctgggggccgagaacagcgtcgcttatagcaacaacagcatcgctatccccaccaactttacaattagcgtgaccacggagatcttgcccgtcagcatgaccaagacctccgtggactgcaccatgtacatctgcggggatagcaccgagtgctccaacctgctcctgcagtacgggtccttctgcacgcagttgaagcgcgcattgaccggcatcgcagtggagcaggacaagaacacgcaggaggtgtttgctcaggtcaagcagatctacaagacgcccccgatcaagtacttcgggggcttcaacttcagccagatcctgcctgacccgagcaagccctccaagcgtagcttcatcgaggacctgctgttcaataaagtgacgctggcagacgccggcttcatcaagcagtacggcgactgtctgggggacatcgctgcccgggacctcatctgtgcccagaagttcaagggcctcacggtcctgccgcccctgctcacagatgagatgatcgcccagtacacgagcgccctgctcgctgggaccatcaccagcgggtggacgttcggcgcgggcgctgcattacagatccccttcgcgatgcagatggcctacagatttaacggtatcggcgtcacgcagaacgtgctgtacgagaaccagaagctgatcgccaaccagttcaacagcgccatcgggaagatccaggacagcttgagcagcaccgcctctgccctggggaagctgcaggacgtcgtgaatcacaatgcccaggccttgaacacgttggtgaagcagctctcatcgaagttcggcgccatcagcagcgtgctgaacgacatcttcagtcggctggaccccccggaggcggaggtccagatcgaccgcctgatcacggggaggctgcagagcttgcagacgtacgtgactcagcagctcatcagggctgctgagatccgggcgtctgccaacctggctgccaccaagatgtccgaatgcgtcttggggcagtccaagcgggtggacttctgcgggaagggctaccacctgatgtccttcccgcagagcgcaccccacggggtggtgttcctgcacgtcacctacgtgccggctcaggagaagaacttcaccacagctcccgcaatctgccacgacgggaaggcccacttcccccgggaaggggtcttcgtgtcgaacggcacccactggttcgtcacgcagcgcaacttctacgagccacagatcatcaccactgacaacaccttcgtcagtgggaactgcgacgtggtcatcgggatcgtcaacaacacggtgtacgatcccctgcagcccgagctggatagcttcaaggaggagctggacaagtacttcaagaaccacacttccccggatgtggacctcggggacatcagcggaatcaacgcctccgtggtcaacatccagaaggagatcgacaggctcaacgaggtggcaaagaacctcaacgagagcctgatcgatctccaggagctggggaagtatgagcagtacatcaagtggccctggtacatctggctcgggttcatcgcagggttgatcgccatcgtgatggtgacgatcatgttgtgctgcatgacgagctgctgcagctgcctgaagggctgctgcagctgcgggagctgctgtaagttcgacgaggacgattccgagccggtgctgaagggcgtgaagctgcactacacctgataatctagattaagtgcttcccacttaaaacatatcaggccttctatttatttaaatatttaaattttatatttattgttgaatgtatggtttgctacctattgtaactattattcttaatcttaaaactataaatatggatcttttatgattctttttgtaagccctaggggctctaaaatggtttcacttatttatcccaaaatttcattgcaaaaaaaaaaaaaaaaaaaaaaaaaaaaaagcatatgactaaaaaaaaaaaaaaaaaaaaaaaaaaaaaaaaaaaaaaaaaaaaaaaaaaaaaaaaaaaaaaaaaaaaaaaaaaaaaaaaaaaaaaaa

SEQ ID NO: 166 - RNA, 4067 nt, synthetic construct
  source 1..4067: mol_type = other RNA
gttccctatcactctctttaatcactactcacagtaacctcaactcctgccacaatgttcgtgttcctggtgctgctgccgctggtcagttcgcagtgcgtgaacctgaccacgcggacgcagctgccacccgcgtacactaacagtttcactcggggggtctactacccggataaggtcttccggagtagcgtgctgcacagcacgcaggacctcttcctcccgttcttctcgaatgtcacgtggttccacgtgatcagcgggacgaacgggacgaagaggttcgacaaccccgtgctcccgttcaatgatggggtgtacttcgccagcatcgagaagagtaacatcattcgagggtggatctttggcactaccctggactccaagactcagagtctgctcatagtcaacaatgccaccaacgtggtgatcaaggtctgtgagttccagttctgcaacgatccattcctggatcacaagaataacaagagctggatggagtctgagttcagagtctatagtagtgccaacaactgcaccttcgagtatgtgagccagccgttcctgatggaccttgaaggcaagcagggcaacttcaagaacctgcgcgagtttgtcttcaagaacatcgacggctacttcaagatatacagcaagcacacccccatcattgtgcgggagccggaggacctgccgcagggcttcagcgctctggagccgctggtggatttgccgatcggcatcaacatcacgcggttccagacgctgttggccctgcacaggtcctacctgactccgggggactccagctccgggtggacggccggggctgcagcctactacgtgggctacttgcagccccggaccttcttgttgaagtacaacgagaacggcacaatcacggacgccgtggattgtgccctggaccccctgagtgagaccaagtgtaccctgaagtccttcaccgtggagaaggggatctatcagacctccaacttccgggtccagccgactgagagcatcgtgcggttccccaacatcacgaacttgtgcccctttgatgaggtgttcaacgccacgcggttcgcgagcgtgtacgcctggaacaggaagcgcatcagcaactgcgtggcagattattcagtgttgtacaacctcgccccgttcttcaccttcaagtgctacggggtgagccccacaaaactgaatgatctctgcttcaccaacgtgtacgccgatagctttgtgattcgcggcgacgaagtccggcagatcgccccagggcagaccggcaacatcgccgactacaactacaagctgcctgacgattttaccggttgcgtgattgcctggaacagcaacaagctggactcgaaggtgtcagggaactacaactacctgtaccggttgttcagaaagagcaacctgaagccgttcgagcgtgacatcagcaccgagatctaccaggccggcaacaagccctgcaacggagtggcaggcttcaactgttactttccgttgcgctcctactcctttcggcccacctacggggtgggccaccagccctatagggtggtggtgctctccttcgagctgctccacgcgccggccacggtgtgtgggccgaagaagagtaccaacctggtgaagaacaagtgcgtcaacttcaacttcaacgggctgaagggaacaggggtgctgacggagagtaacaagaagttcctgccattccagcagttcgggcgtgacatcgctgacaccaccgacgctgtgcgggatccccagaccctcgagatcctggacatcaccccgtgcagcttcggtggtgtcagcgtgatcacgcccgggaccaacacctccaaccaggtggccgtgctgtaccagggcgtgaattgcaccgaggtgccggtggcaattcacgccgaccagctgacgcccacctggcgggtgtactccacgggcagcaacgtcttccagacccgcgccggctgcttgatcggggccgagtacgtgaacaacagctacgagtgcgatatcccgatcggggccgggatctgcgcctcctaccagacgcagaccaagtcccatcggcgcgctcgtagcgtggcctcccagagcatcatcgcctacacgatgagcctgggggccgagaactccgtcgcgtacagcaacaactccatcgctatccccacaaattttacaattagcgtgaccacggagatcttgcccgtcagcatgaccaagacctccgtggactgcaccatgtacatttgtggggatagcaccgagtgttccaacctgctcctgcagtacgggtccttctgcacgcagctgaagcgtgccctgaccggtattgcagtggagcaggacaagaacactcaggaggtgtttgctcaggtcaagcagatctacaagacgcccccgattaaatacttcgggggcttcaactttagccagatcctgcccgacccgagcaagccctccaagcggagcttcattgaggacctgctctttaacaaggtgacgctggcagacgccggcttcatcaagcagtacggcgactgtctgggggacatcgctgcccgggacctcatctgtgcccagaagttcaagggcctcacggtcctgccgcctctgctcacagatgagatgatcgcccagtacacgagcgctctgctcgctgggaccatcaccagcgggtggacgttcggtgctggggcggcattacagatcccctttgccatgcagatggcctacagattcaacgggattggtgtcacgcagaacgtgctgtacgagaaccagaagctgattgccaaccagttcaacagcgcaatcggtaagatccaggacagcttgagcagcaccgcctctgccctggggaagctgcaggacgtcgtgaatcacaacgcccaggccctgaacacgttggtgaagcagctctcatcaaagttcggcgcaatcagcagcgtgctgaacgacatcttcagtcggctggaccccccggaggctgaggtccagatagatcgcctcatcacgggaaggcttcagagtttgcagacgtacgtgactcagcagctcatccgggctgctgagatccgtgcgtctgcaaacctggctgccaccaagatgagcgagtgcgtcttggggcagtcaaagcgggtggacttctgcgggaagggctaccacctgatgtccttcccgcagagcgcaccccacggggtggtgttccttcacgtcacctacgtgccggctcaggagaagaacttcacaacagctcccgccatctgccacgacgggaaggcccacttcccccgggaaggggtcttcgtgtcgaatggcacccactggttcgtcacgcagcgcaacttctatgagccacagatcatcaccactgacaacaccttcgtcagtgggaactgcgatgtggtcatagggatcgtcaacaacacggtgtacgatcccctgcagcccgagctggatagcttcaaggaggagctggacaagtacttcaagaatcatacttccccggatgttgacctcggggacatcagcggcatcaacgcctccgtggtcaacatccagaaggagatcgacaggctcaacgaggtggcaaaaaacctcaacgagagcctgatcgatctccaggagctggggaagtatgagcagtacatcaagtggccttggtacatctggctcgggttcatcgcagggctgatcgccatcgtgatggtgacgatcatgttgtgctgcatgacgagctgctgcagctgcctgaagggctgctgcagctgcgggagctgttgcaagttcgacgaggacgactccgagccggtgctgaagggcgtgaagctgcactacacctgataattaagtgcttcccacttaaaacatatcaggccttctatttatttaaatatttaaattttatatttattgttgaatgtatggtttgctacctattgtaactattattcttaatcttaaaactataaatatggatcttttatgattctttttgtaagccctaggggctctaaaatggtttcacttatttatcccaaaat

SEQ ID NO: 167 - RNA, 4073 nt, synthetic construct
  source 1..4073: mol_type = other RNA
gttccctatcactctctttaatcactactcacagtaacctcaactcctgccacaatgttcgtgttcctggtgctgctgccgctggtcagttcgcagtgcgtgaacctgaccacgcggacgcagctgccacccgcgtacactaacagtttcactcggggggtctactacccggataaggtcttccggagtagcgtgctgcacagcacgcaggacctcttcctcccgttcttctcgaatgtcacgtggttccacgtgatcagcgggacgaacgggacgaagaggttcgacaaccccgtgctcccgttcaatgatggggtgtacttcgccagcatcgagaagagtaacatcattcgagggtggatctttggcactaccctggactccaagactcagagtctgctcatagtcaacaatgccaccaacgtggtgatcaaggtctgtgagttccagttctgcaacgatccattcctggatcacaagaataacaagagctggatggagtctgagttcagagtctatagtagtgccaacaactgcaccttcgagtatgtgagccagccgttcctgatggaccttgaaggcaagcagggcaacttcaagaacctgcgcgagtttgtcttcaagaacatcgacggctacttcaagatatacagcaagcacacccccatcattgtgcgggagccggaggacctgccgcagggcttcagcgctctggagccgctggtggatttgccgatcggcatcaacatcacgcggttccagacgctgttggccctgcacaggtcctacctgactccgggggactccagctccgggtggacggccggggctgcagcctactacgtgggctacttgcagccccggaccttcttgttgaagtacaacgagaacggcacaatcacggacgccgtggattgtgccctggaccccctgagtgagaccaagtgtaccctgaagtccttcaccgtggagaaggggatctatcagacctccaacttccgggtccagccgactgagagcatcgtgcggttccccaacatcacgaacttgtgcccctttgatgaggtgttcaacgccacgcggttcgcgagcgtgtacgcctggaacaggaagcgcatcagcaactgcgtggcagattattcagtgttgtacaacctcgccccgttcttcaccttcaagtgctacggggtgagccccacaaaactgaatgatctctgcttcaccaacgtgtacgccgatagctttgtgattcgcggcgacgaagtccggcagatcgccccagggcagaccggcaacatcgccgactacaactacaagctgcctgacgattttaccggttgcgtgattgcctggaacagcaacaagctggactcgaaggtgtcagggaactacaactacctgtaccggttgttcagaaagagcaacctgaagccgttcgagcgtgacatcagcaccgagatctaccaggccggcaacaagccctgcaacggagtggcaggcttcaactgttactttccgttgcgctcctactcctttcggcccacctacggggtgggccaccagccctatagggtggtggtgctctccttcgagctgctccacgcgccggccacggtgtgtgggccgaagaagagtaccaacctggtgaagaacaagtgcgtcaacttcaacttcaacgggctgaagggaacaggggtgctgacggagagtaacaagaagttcctgccattccagcagttcgggcgtgacatcgctgacaccaccgacgctgtgcgggatccccagaccctcgagatcctggacatcaccccgtgcagcttcggtggtgtcagcgtgatcacgcccgggaccaacacctccaaccaggtggccgtgctgtaccagggcgtgaattgcaccgaggtgccggtggcaattcacgccgaccagctgacgcccacctggcgggtgtactccacgggcagcaacgtcttccagacccgcgccggctgcttgatcggggccgagtacgtgaacaacagctacgagtgcgatatcccgatcggggccgggatctgcgcctcctaccagacgcagaccaagtcccatcggcgcgctcgtagcgtggcctcccagagcatcatcgcctacacgatgagcctgggggccgagaactccgtcgcgtacagcaacaactccatcgctatccccacaaattttacaattagcgtgaccacggagatcttgcccgtcagcatgaccaagacctccgtggactgcaccatgtacatttgtggggatagcaccgagtgttccaacctgctcctgcagtacgggtccttctgcacgcagctgaagcgtgccctgaccggtattgcagtggagcaggacaagaacactcaggaggtgtttgctcaggtcaagcagatctacaagacgcccccgattaaatacttcgggggcttcaactttagccagatcctgcccgacccgagcaagccctccaagcggagcttcattgaggacctgctctttaacaaggtgacgctggcagacgccggcttcatcaagcagtacggcgactgtctgggggacatcgctgcccgggacctcatctgtgcccagaagttcaagggcctcacggtcctgccgcctctgctcacagatgagatgatcgcccagtacacgagcgctctgctcgctgggaccatcaccagcgggtggacgttcggtgctggggcggcattacagatcccctttgccatgcagatggcctacagattcaacgggattggtgtcacgcagaacgtgctgtacgagaaccagaagctgattgccaaccagttcaacagcgcaatcggtaagatccaggacagcttgagcagcaccgcctctgccctggggaagctgcaggacgtcgtgaatcacaacgcccaggccctgaacacgttggtgaagcagctctcatcaaagttcggcgcaatcagcagcgtgctgaacgacatcttcagtcggctggaccccccggaggctgaggtccagatagatcgcctcatcacgggaaggcttcagagtttgcagacgtacgtgactcagcagctcatccgggctgctgagatccgtgcgtctgcaaacctggctgccaccaagatgagcgagtgcgtcttggggcagtcaaagcgggtggacttctgcgggaagggctaccacctgatgtccttcccgcagagcgcaccccacggggtggtgttccttcacgtcacctacgtgccggctcaggagaagaacttcacaacagctcccgccatctgccacgacgggaaggcccacttcccccgggaaggggtcttcgtgtcgaatggcacccactggttcgtcacgcagcgcaacttctatgagccacagatcatcaccactgacaacaccttcgtcagtgggaactgcgatgtggtcatagggatcgtcaacaacacggtgtacgatcccctgcagcccgagctggatagcttcaaggaggagctggacaagtacttcaagaatcatacttccccggatgttgacctcggggacatcagcggcatcaacgcctccgtggtcaacatccagaaggagatcgacaggctcaacgaggtggcaaaaaacctcaacgagagcctgatcgatctccaggagctggggaagtatgagcagtacatcaagtggccttggtacatctggctcgggttcatcgcagggctgatcgccatcgtgatggtgacgatcatgttgtgctgcatgacgagctgctgcagctgcctgaagggctgctgcagctgcgggagctgttgcaagttcgacgaggacgactccgagccggtgctgaagggcgtgaagctgcactacacctgataatctagattaagtgcttcccacttaaaacatatcaggccttctatttatttaaatatttaaattttatatttattgttgaatgtatggtttgctacctattgtaactattattcttaatcttaaaactataaatatggatcttttatgattctttttgtaagccctaggggctctaaaatggtttcacttatttatcccaaaat

SEQ ID NO: 168 - RNA, 4077 nt, synthetic construct
  source 1..4077: mol_type = other RNA
aggagttccctatcactctctttaatcactactcacagtaacctcaactcctgccacaatgttcgtgttcctggtgctgctgccgctggtcagttcgcagtgcgtgaacctgaccacgcggacgcagctgccacccgcgtacactaacagtttcactcggggggtctactacccggataaggtcttccggagtagcgtgctgcacagcacgcaggacctcttcctcccgttcttctcgaatgtcacgtggttccacgtgatcagcgggacgaacgggacgaagaggttcgacaaccccgtgctcccgttcaatgatggggtgtacttcgccagcatcgagaagagtaacatcattcgagggtggatctttggcactaccctggactccaagactcagagtctgctcatagtcaacaatgccaccaacgtggtgatcaaggtctgtgagttccagttctgcaacgatccattcctggatcacaagaataacaagagctggatggagtctgagttcagagtctatagtagtgccaacaactgcaccttcgagtatgtgagccagccgttcctgatggaccttgaaggcaagcagggcaacttcaagaacctgcgcgagtttgtcttcaagaacatcgacggctacttcaagatatacagcaagcacacccccatcattgtgcgggagccggaggacctgccgcagggcttcagcgctctggagccgctggtggatttgccgatcggcatcaacatcacgcggttccagacgctgttggccctgcacaggtcctacctgactccgggggactccagctccgggtggacggccggggctgcagcctactacgtgggctacttgcagccccggaccttcttgttgaagtacaacgagaacggcacaatcacggacgccgtggattgtgccctggaccccctgagtgagaccaagtgtaccctgaagtccttcaccgtggagaaggggatctatcagacctccaacttccgggtccagccgactgagagcatcgtgcggttccccaacatcacgaacttgtgcccctttgatgaggtgttcaacgccacgcggttcgcgagcgtgtacgcctggaacaggaagcgcatcagcaactgcgtggcagattattcagtgttgtacaacctcgccccgttcttcaccttcaagtgctacggggtgagccccacaaaactgaatgatctctgcttcaccaacgtgtacgccgatagctttgtgattcgcggcgacgaagtccggcagatcgccccagggcagaccggcaacatcgccgactacaactacaagctgcctgacgattttaccggttgcgtgattgcctggaacagcaacaagctggactcgaaggtgtcagggaactacaactacctgtaccggttgttcagaaagagcaacctgaagccgttcgagcgtgacatcagcaccgagatctaccaggccggcaacaagccctgcaacggagtggcaggcttcaactgttactttccgttgcgctcctactcctttcggcccacctacggggtgggccaccagccctatagggtggtggtgctctccttcgagctgctccacgcgccggccacggtgtgtgggccgaagaagagtaccaacctggtgaagaacaagtgcgtcaacttcaacttcaacgggctgaagggaacaggggtgctgacggagagtaacaagaagttcctgccattccagcagttcgggcgtgacatcgctgacaccaccgacgctgtgcgggatccccagaccctcgagatcctggacatcaccccgtgcagcttcggtggtgtcagcgtgatcacgcccgggaccaacacctccaaccaggtggccgtgctgtaccagggcgtgaattgcaccgaggtgccggtggcaattcacgccgaccagctgacgcccacctggcgggtgtactccacgggcagcaacgtcttccagacccgcgccggctgcttgatcggggccgagtacgtgaacaacagctacgagtgcgatatcccgatcggggccgggatctgcgcctcctaccagacgcagaccaagtcccatcggcgcgctcgtagcgtggcctcccagagcatcatcgcctacacgatgagcctgggggccgagaactccgtcgcgtacagcaacaactccatcgctatccccacaaattttacaattagcgtgaccacggagatcttgcccgtcagcatgaccaagacctccgtggactgcaccatgtacatttgtggggatagcaccgagtgttccaacctgctcctgcagtacgggtccttctgcacgcagctgaagcgtgccctgaccggtattgcagtggagcaggacaagaacactcaggaggtgtttgctcaggtcaagcagatctacaagacgcccccgattaaatacttcgggggcttcaactttagccagatcctgcccgacccgagcaagccctccaagcggagcttcattgaggacctgctctttaacaaggtgacgctggcagacgccggcttcatcaagcagtacggcgactgtctgggggacatcgctgcccgggacctcatctgtgcccagaagttcaagggcctcacggtcctgccgcctctgctcacagatgagatgatcgcccagtacacgagcgctctgctcgctgggaccatcaccagcgggtggacgttcggtgctggggcggcattacagatcccctttgccatgcagatggcctacagattcaacgggattggtgtcacgcagaacgtgctgtacgagaaccagaagctgattgccaaccagttcaacagcgcaatcggtaagatccaggacagcttgagcagcaccgcctctgccctggggaagctgcaggacgtcgtgaatcacaacgcccaggccctgaacacgttggtgaagcagctctcatcaaagttcggcgcaatcagcagcgtgctgaacgacatcttcagtcggctggaccccccggaggctgaggtccagatagatcgcctcatcacgggaaggcttcagagtttgcagacgtacgtgactcagcagctcatccgggctgctgagatccgtgcgtctgcaaacctggctgccaccaagatgagcgagtgcgtcttggggcagtcaaagcgggtggacttctgcgggaagggctaccacctgatgtccttcccgcagagcgcaccccacggggtggtgttccttcacgtcacctacgtgccggctcaggagaagaacttcacaacagctcccgccatctgccacgacgggaaggcccacttcccccgggaaggggtcttcgtgtcgaatggcacccactggttcgtcacgcagcgcaacttctatgagccacagatcatcaccactgacaacaccttcgtcagtgggaactgcgatgtggtcatagggatcgtcaacaacacggtgtacgatcccctgcagcccgagctggatagcttcaaggaggagctggacaagtacttcaagaatcatacttccccggatgttgacctcggggacatcagcggcatcaacgcctccgtggtcaacatccagaaggagatcgacaggctcaacgaggtggcaaaaaacctcaacgagagcctgatcgatctccaggagctggggaagtatgagcagtacatcaagtggccttggtacatctggctcgggttcatcgcagggctgatcgccatcgtgatggtgacgatcatgttgtgctgcatgacgagctgctgcagctgcctgaagggctgctgcagctgcgggagctgttgcaagttcgacgaggacgactccgagccggtgctgaagggcgtgaagctgcactacacctgataatctagattaagtgcttcccacttaaaacatatcaggccttctatttatttaaatatttaaattttatatttattgttgaatgtatggtttgctacctattgtaactattattcttaatcttaaaactataaatatggatcttttatgattctttttgtaagccctaggggctctaaaatggtttcacttatttatcccaaaat

SEQ ID NO: 169 - RNA, 4213 nt, synthetic construct
  source 1..4213: mol_type = other RNA
aggagttccctatcactctctttaatcactactcacagtaacctcaactcctgccacaatgttcgtgttcctggtgctgctgccgctggtcagttcgcagtgcgtgaacctgaccacgcggacgcagctgccacccgcgtacactaacagtttcactcggggggtctactacccggataaggtcttccggagtagcgtgctgcacagcacgcaggacctcttcctcccgttcttctcgaatgtcacgtggttccacgtgatcagcgggacgaacgggacgaagaggttcgacaaccccgtgctcccgttcaatgatggggtgtacttcgccagcatcgagaagagtaacatcattcgagggtggatctttggcactaccctggactccaagactcagagtctgctcatagtcaacaatgccaccaacgtggtgatcaaggtctgtgagttccagttctgcaacgatccattcctggatcacaagaataacaagagctggatggagtctgagttcagagtctatagtagtgccaacaactgcaccttcgagtatgtgagccagccgttcctgatggaccttgaaggcaagcagggcaacttcaagaacctgcgcgagtttgtcttcaagaacatcgacggctacttcaagatatacagcaagcacacccccatcattgtgcgggagccggaggacctgccgcagggcttcagcgctctggagccgctggtggatttgccgatcggcatcaacatcacgcggttccagacgctgttggccctgcacaggtcctacctgactccgggggactccagctccgggtggacggccggggctgcagcctactacgtgggctacttgcagccccggaccttcttgttgaagtacaacgagaacggcacaatcacggacgccgtggattgtgccctggaccccctgagtgagaccaagtgtaccctgaagtccttcaccgtggagaaggggatctatcagacctccaacttccgggtccagccgactgagagcatcgtgcggttccccaacatcacgaacttgtgcccctttgatgaggtgttcaacgccacgcggttcgcgagcgtgtacgcctggaacaggaagcgcatcagcaactgcgtggcagattattcagtgttgtacaacctcgccccgttcttcaccttcaagtgctacggggtgagccccacaaaactgaatgatctctgcttcaccaacgtgtacgccgatagctttgtgattcgcggcgacgaagtccggcagatcgccccagggcagaccggcaacatcgccgactacaactacaagctgcctgacgattttaccggttgcgtgattgcctggaacagcaacaagctggactcgaaggtgtcagggaactacaactacctgtaccggttgttcagaaagagcaacctgaagccgttcgagcgtgacatcagcaccgagatctaccaggccggcaacaagccctgcaacggagtggcaggcttcaactgttactttccgttgcgctcctactcctttcggcccacctacggggtgggccaccagccctatagggtggtggtgctctccttcgagctgctccacgcgccggccacggtgtgtgggccgaagaagagtaccaacctggtgaagaacaagtgcgtcaacttcaacttcaacgggctgaagggaacaggggtgctgacggagagtaacaagaagttcctgccattccagcagttcgggcgtgacatcgctgacaccaccgacgctgtgcgggatccccagaccctcgagatcctggacatcaccccgtgcagcttcggtggtgtcagcgtgatcacgcccgggaccaacacctccaaccaggtggccgtgctgtaccagggcgtgaattgcaccgaggtgccggtggcaattcacgccgaccagctgacgcccacctggcgggtgtactccacgggcagcaacgtcttccagacccgcgccggctgcttgatcggggccgagtacgtgaacaacagctacgagtgcgatatcccgatcggggccgggatctgcgcctcctaccagacgcagaccaagtcccatcggcgcgctcgtagcgtggcctcccagagcatcatcgcctacacgatgagcctgggggccgagaactccgtcgcgtacagcaacaactccatcgctatccccacaaattttacaattagcgtgaccacggagatcttgcccgtcagcatgaccaagacctccgtggactgcaccatgtacatttgtggggatagcaccgagtgttccaacctgctcctgcagtacgggtccttctgcacgcagctgaagcgtgccctgaccggtattgcagtggagcaggacaagaacactcaggaggtgtttgctcaggtcaagcagatctacaagacgcccccgattaaatacttcgggggcttcaactttagccagatcctgcccgacccgagcaagccctccaagcggagcttcattgaggacctgctctttaacaaggtgacgctggcagacgccggcttcatcaagcagtacggcgactgtctgggggacatcgctgcccgggacctcatctgtgcccagaagttcaagggcctcacggtcctgccgcctctgctcacagatgagatgatcgcccagtacacgagcgctctgctcgctgggaccatcaccagcgggtggacgttcggtgctggggcggcattacagatcccctttgccatgcagatggcctacagattcaacgggattggtgtcacgcagaacgtgctgtacgagaaccagaagctgattgccaaccagttcaacagcgcaatcggtaagatccaggacagcttgagcagcaccgcctctgccctggggaagctgcaggacgtcgtgaatcacaacgcccaggccctgaacacgttggtgaagcagctctcatcaaagttcggcgcaatcagcagcgtgctgaacgacatcttcagtcggctggaccccccggaggctgaggtccagatagatcgcctcatcacgggaaggcttcagagtttgcagacgtacgtgactcagcagctcatccgggctgctgagatccgtgcgtctgcaaacctggctgccaccaagatgagcgagtgcgtcttggggcagtcaaagcgggtggacttctgcgggaagggctaccacctgatgtccttcccgcagagcgcaccccacggggtggtgttccttcacgtcacctacgtgccggctcaggagaagaacttcacaacagctcccgccatctgccacgacgggaaggcccacttcccccgggaaggggtcttcgtgtcgaatggcacccactggttcgtcacgcagcgcaacttctatgagccacagatcatcaccactgacaacaccttcgtcagtgggaactgcgatgtggtcatagggatcgtcaacaacacggtgtacgatcccctgcagcccgagctggatagcttcaaggaggagctggacaagtacttcaagaatcatacttccccggatgttgacctcggggacatcagcggcatcaacgcctccgtggtcaacatccagaaggagatcgacaggctcaacgaggtggcaaaaaacctcaacgagagcctgatcgatctccaggagctggggaagtatgagcagtacatcaagtggccttggtacatctggctcgggttcatcgcagggctgatcgccatcgtgatggtgacgatcatgttgtgctgcatgacgagctgctgcagctgcctgaagggctgctgcagctgcgggagctgttgcaagttcgacgaggacgactccgagccggtgctgaagggcgtgaagctgcactacacctgataatctagattaagtgcttcccacttaaaacatatcaggccttctatttatttaaatatttaaattttatatttattgttgaatgtatggtttgctacctattgtaactattattcttaatcttaaaactataaatatggatcttttatgattctttttgtaagccctaggggctctaaaatggtttcacttatttatcccaaaatttcattgcaaaaaaaaaaaaaaaaaaaaaaaaaaaaaagcatatgactaaaaaaaaaaaaaaaaaaaaaaaaaaaaaaaaaaaaaaaaaaaaaaaaaaaaaaaaaaaaaaaaaaaaaaaaaaaaaaaaaaaaaaaa

SEQ ID NO: 170 - RNA, 4067 nt, synthetic construct
  source 1..4067: mol_type = other RNA
gttccctatcactctctttaatcactactcacagtaacctcaactcctgccacaatgttcgtgttcctggtgttgttgccgctggtgtcgagccagtgcgtcaacctgacgacacggacacagctgccccccgcgtacacgaactcgttcacgcggggggtgtactacccagacaaggtcttcaggagcagcgtgctgcacagcacgcaggacctcttcctcccgttcttctccaatgtcacgtggttccacgtgatatcggggacgaacgggacgaagaggttcgacaaccccgtgctcccgttcaatgacggggtgtacttcgcgtcgatcgagaagagtaacatcattcgagggtggatttttggcactaccctggactcgaagactcagagcctgctcatagtcaacaacgccaccaacgtggtgatcaaggtctgtgagttccagttctgcaacgacccgttcttggaccacaagaacaacaagagctggatggagtctgagtttcgagtctacagtagtgccaacaattgcaccttcgaatatgtgagccagccgttcctgatggacctggagggcaagcagggcaacttcaagaacttgcgcgagtttgtcttcaagaacatcgacggctacttcaagatctactcgaagcacaccccgatcattgtgcgggagccggaggacctgccgcagggcttcagcgctctggaaccgctggtggacttgcccatcggcatcaacatcacgcggttccagacgctgctggccctgcacaggtcctacctgactccgggagactcttcgtcggggtggaccgcgggtgcagccgcctactacgtgggctacctgcagccgcggacgttcttgttgaagtacaacgagaacggcacaatcaccgacgcggtggattgtgccctcgacccgctgagcgagaccaagtgcacactcaagagcttcacggtggagaaggggatctatcagacctccaacttccgggtccagccgactgagagcatcgttcggttcccgaacatcaccaacctgtgcccgtttgacgaggtgttcaacgccacgcggttcgcgtccgtgtacgcctggaaccggaaacggatctcgaactgcgtggcggactactcagtgttgtacaacctcgccccgttcttcaccttcaagtgctacggggtgagccccacaaagctgaacgacctctgcttcaccaacgtctacgcggatagcttcgtgatccgcggcgacgaggtgaggcagatcgcacctggtcagacgggcaacatcgccgactataattacaagctgcctgatgatttcacgggatgtgtcatcgcttggaacagcaacaagttggactccaaggtgagcgggaactataactacctgtaccgcttatttcggaagtccaacttgaagccgttcgagcgagacatatccacggagatctatcaggcaggcaataagccctgcaacggggtggcagggttcaattgttactttcccctgaggtcgtactctttccggcccacatacggggtggggcaccagccttacagggtggtggtgctatccttcgagttgctgcacgccccagccaccgtatgtgggccgaagaagagtacgaacctcgtgaagaacaagtgcgtcaacttcaacttcaacgggttgaaggggacgggcgtgctcacggagagtaacaagaaattcctgccattccagcagttcgggcgtgatatcgctgacaccaccgacgcggtgcgggatccccagaccctggagatcctggacatcacgccgtgcagcttcggtggtgtcagcgtgatcacgcccggcaccaacacctcgaaccaggtggcagtgctttaccagggtgtgaactgcactgaggtgcctgtggctatccacgccgatcagctgaccccaacgtggagggtgtactcgacagggagcaacgtcttccagacccgcgctggctgcctgattggcgctgagtacgtgaacaactcgtacgagtgcgacatccccattggggccggcatctgcgcgagttaccagacccagaccaagagccatcggagggcgagatcggtggcatcccagtcgatcatcgcctacacgatgagcctgggggccgagaacagcgtggcctacagcaacaacagcatcgctatccccacaaactttacaatcagtgtgaccaccgagatcttgcccgtcagcatgaccaagacctcggtggactgcactatgtacatctgtggggatagcaccgagtgttccaacctgctcctccagtacggctcgttctgcacgcaactgaagcgtgcattgacgggcatcgcggtggagcaggacaagaacactcaggaggtgtttgctcaggtcaagcagatctacaagacgcccccgatcaagtacttcgggggcttcaacttctcccagatcctgccggacccgagcaagccctccaagaggtccttcatcgaggacctcttgttcaacaaggtgactctcgcggatgccggcttcatcaaacagtatggggactgcctgggtgacatcgccgccagggacctgatctgcgcgcagaagttcaaggggctgacagtgctgcccccgctcctgacggacgagatgatcgctcagtacacgtccgcgctgttggcggggacgattacgagcggctggacgttcggagcgggggcagcactgcagatccctttcgcgatgcagatggcctacaggttcaatggcatcggtgtcacccagaacgtactctacgagaatcagaagctcatcgccaatcagttcaacagcgcgatcgggaagatccaggactccctgtcgagtacagcctccgcgttggggaagctgcaggacgtggttaaccacaacgcccaggccctgaacaccctggtgaagcagctgtcatccaagttcggggccatcagttcggtgctgaacgacatcttcagtcggctggaccccccggaggcggaggtccagatagatcgcctcatcaccgggcgcctccagagtttgcagacgtacgtgactcagcagctcatacgggctgctgagatacgtgcgtctgcaaacctggcggcgaccaagatgagcgagtgtgtacttggtcagagcaagcgggtcgacttctgcgggaagggctatcacctgatgtccttcccgcagagcgccccccacggggtggtcttcctgcacgtgacgtatgtgccggcgcaggagaagaacttcaccactgcgccggccatatgtcacgacgggaaggcccacttcccccgggagggcgtgttcgtgtcgaatgggacgcactggttcgtcacccagcggaacttctatgaaccacagataatcaccactgacaacaccttcgtcagtgggaactgcgatgtggtcataggaatcgtcaacaacacggtgtacgacccccttcagcccgagctggactcgttcaaggaggagctggacaaatacttcaagaaccacacgagcccggatgttgacctcggggacattagcggaatcaatgcctccgtggtcaacatccaaaaggagatcgacaggctcaacgaggtggccaagaacctcaacgagagcctgatcgatctccaggagctcggcaagtacgagcagtacatcaagtggccgtggtacatatggctggggttcatcgcagggctgatcgcgatcgtgatggtcacgatcatgctctgctgcatgacctcgtgctgctcgtgcttgaagggctgctgctcgtgtggttcttgctgcaagttcgacgaggacgattccgagccggtgctgaagggggtcaaactgcactacacctgataattaagtgcttcccacttaaaacatatcaggccttctatttatttaaatatttaaattttatatttattgttgaatgtatggtttgctacctattgtaactattattcttaatcttaaaactataaatatggatcttttatgattctttttgtaagccctaggggctctaaaatggtttcacttatttatcccaaaat

SEQ ID NO: 171 - RNA, 4073 nt, synthetic construct
  source 1..4073: mol_type = other RNA
gttccctatcactctctttaatcactactcacagtaacctcaactcctgccacaatgttcgtgttcctggtgttgttgccgctggtgtcgagccagtgcgtcaacctgacgacacggacacagctgccccccgcgtacacgaactcgttcacgcggggggtgtactacccagacaaggtcttcaggagcagcgtgctgcacagcacgcaggacctcttcctcccgttcttctccaatgtcacgtggttccacgtgatatcggggacgaacgggacgaagaggttcgacaaccccgtgctcccgttcaatgacggggtgtacttcgcgtcgatcgagaagagtaacatcattcgagggtggatttttggcactaccctggactcgaagactcagagcctgctcatagtcaacaacgccaccaacgtggtgatcaaggtctgtgagttccagttctgcaacgacccgttcttggaccacaagaacaacaagagctggatggagtctgagtttcgagtctacagtagtgccaacaattgcaccttcgaatatgtgagccagccgttcctgatggacctggagggcaagcagggcaacttcaagaacttgcgcgagtttgtcttcaagaacatcgacggctacttcaagatctactcgaagcacaccccgatcattgtgcgggagccggaggacctgccgcagggcttcagcgctctggaaccgctggtggacttgcccatcggcatcaacatcacgcggttccagacgctgctggccctgcacaggtcctacctgactccgggagactcttcgtcggggtggaccgcgggtgcagccgcctactacgtgggctacctgcagccgcggacgttcttgttgaagtacaacgagaacggcacaatcaccgacgcggtggattgtgccctcgacccgctgagcgagaccaagtgcacactcaagagcttcacggtggagaaggggatctatcagacctccaacttccgggtccagccgactgagagcatcgttcggttcccgaacatcaccaacctgtgcccgtttgacgaggtgttcaacgccacgcggttcgcgtccgtgtacgcctggaaccggaaacggatctcgaactgcgtggcggactactcagtgttgtacaacctcgccccgttcttcaccttcaagtgctacggggtgagccccacaaagctgaacgacctctgcttcaccaacgtctacgcggatagcttcgtgatccgcggcgacgaggtgaggcagatcgcacctggtcagacgggcaacatcgccgactataattacaagctgcctgatgatttcacgggatgtgtcatcgcttggaacagcaacaagttggactccaaggtgagcgggaactataactacctgtaccgcttatttcggaagtccaacttgaagccgttcgagcgagacatatccacggagatctatcaggcaggcaataagccctgcaacggggtggcagggttcaattgttactttcccctgaggtcgtactctttccggcccacatacggggtggggcaccagccttacagggtggtggtgctatccttcgagttgctgcacgccccagccaccgtatgtgggccgaagaagagtacgaacctcgtgaagaacaagtgcgtcaacttcaacttcaacgggttgaaggggacgggcgtgctcacggagagtaacaagaaattcctgccattccagcagttcgggcgtgatatcgctgacaccaccgacgcggtgcgggatccccagaccctggagatcctggacatcacgccgtgcagcttcggtggtgtcagcgtgatcacgcccggcaccaacacctcgaaccaggtggcagtgctttaccagggtgtgaactgcactgaggtgcctgtggctatccacgccgatcagctgaccccaacgtggagggtgtactcgacagggagcaacgtcttccagacccgcgctggctgcctgattggcgctgagtacgtgaacaactcgtacgagtgcgacatccccattggggccggcatctgcgcgagttaccagacccagaccaagagccatcggagggcgagatcggtggcatcccagtcgatcatcgcctacacgatgagcctgggggccgagaacagcgtggcctacagcaacaacagcatcgctatccccacaaactttacaatcagtgtgaccaccgagatcttgcccgtcagcatgaccaagacctcggtggactgcactatgtacatctgtggggatagcaccgagtgttccaacctgctcctccagtacggctcgttctgcacgcaactgaagcgtgcattgacgggcatcgcggtggagcaggacaagaacactcaggaggtgtttgctcaggtcaagcagatctacaagacgcccccgatcaagtacttcgggggcttcaacttctcccagatcctgccggacccgagcaagccctccaagaggtccttcatcgaggacctcttgttcaacaaggtgactctcgcggatgccggcttcatcaaacagtatggggactgcctgggtgacatcgccgccagggacctgatctgcgcgcagaagttcaaggggctgacagtgctgcccccgctcctgacggacgagatgatcgctcagtacacgtccgcgctgttggcggggacgattacgagcggctggacgttcggagcgggggcagcactgcagatccctttcgcgatgcagatggcctacaggttcaatggcatcggtgtcacccagaacgtactctacgagaatcagaagctcatcgccaatcagttcaacagcgcgatcgggaagatccaggactccctgtcgagtacagcctccgcgttggggaagctgcaggacgtggttaaccacaacgcccaggccctgaacaccctggtgaagcagctgtcatccaagttcggggccatcagttcggtgctgaacgacatcttcagtcggctggaccccccggaggcggaggtccagatagatcgcctcatcaccgggcgcctccagagtttgcagacgtacgtgactcagcagctcatacgggctgctgagatacgtgcgtctgcaaacctggcggcgaccaagatgagcgagtgtgtacttggtcagagcaagcgggtcgacttctgcgggaagggctatcacctgatgtccttcccgcagagcgccccccacggggtggtcttcctgcacgtgacgtatgtgccggcgcaggagaagaacttcaccactgcgccggccatatgtcacgacgggaaggcccacttcccccgggagggcgtgttcgtgtcgaatgggacgcactggttcgtcacccagcggaacttctatgaaccacagataatcaccactgacaacaccttcgtcagtgggaactgcgatgtggtcataggaatcgtcaacaacacggtgtacgacccccttcagcccgagctggactcgttcaaggaggagctggacaaatacttcaagaaccacacgagcccggatgttgacctcggggacattagcggaatcaatgcctccgtggtcaacatccaaaaggagatcgacaggctcaacgaggtggccaagaacctcaacgagagcctgatcgatctccaggagctcggcaagtacgagcagtacatcaagtggccgtggtacatatggctggggttcatcgcagggctgatcgcgatcgtgatggtcacgatcatgctctgctgcatgacctcgtgctgctcgtgcttgaagggctgctgctcgtgtggttcttgctgcaagttcgacgaggacgattccgagccggtgctgaagggggtcaaactgcactacacctgataatctagattaagtgcttcccacttaaaacatatcaggccttctatttatttaaatatttaaattttatatttattgttgaatgtatggtttgctacctattgtaactattattcttaatcttaaaactataaatatggatcttttatgattctttttgtaagccctaggggctctaaaatggtttcacttatttatcccaaaat

SEQ ID NO: 172 - RNA, 4077 nt, synthetic construct
  source 1..4077: mol_type = other RNA
aggagttccctatcactctctttaatcactactcacagtaacctcaactcctgccacaatgttcgtgttcctggtgttgttgccgctggtgtcgagccagtgcgtcaacctgacgacacggacacagctgccccccgcgtacacgaactcgttcacgcggggggtgtactacccagacaaggtcttcaggagcagcgtgctgcacagcacgcaggacctcttcctcccgttcttctccaatgtcacgtggttccacgtgatatcggggacgaacgggacgaagaggttcgacaaccccgtgctcccgttcaatgacggggtgtacttcgcgtcgatcgagaagagtaacatcattcgagggtggatttttggcactaccctggactcgaagactcagagcctgctcatagtcaacaacgccaccaacgtggtgatcaaggtctgtgagttccagttctgcaacgacccgttcttggaccacaagaacaacaagagctggatggagtctgagtttcgagtctacagtagtgccaacaattgcaccttcgaatatgtgagccagccgttcctgatggacctggagggcaagcagggcaacttcaagaacttgcgcgagtttgtcttcaagaacatcgacggctacttcaagatctactcgaagcacaccccgatcattgtgcgggagccggaggacctgccgcagggcttcagcgctctggaaccgctggtggacttgcccatcggcatcaacatcacgcggttccagacgctgctggccctgcacaggtcctacctgactccgggagactcttcgtcggggtggaccgcgggtgcagccgcctactacgtgggctacctgcagccgcggacgttcttgttgaagtacaacgagaacggcacaatcaccgacgcggtggattgtgccctcgacccgctgagcgagaccaagtgcacactcaagagcttcacggtggagaaggggatctatcagacctccaacttccgggtccagccgactgagagcatcgttcggttcccgaacatcaccaacctgtgcccgtttgacgaggtgttcaacgccacgcggttcgcgtccgtgtacgcctggaaccggaaacggatctcgaactgcgtggcggactactcagtgttgtacaacctcgccccgttcttcaccttcaagtgctacggggtgagccccacaaagctgaacgacctctgcttcaccaacgtctacgcggatagcttcgtgatccgcggcgacgaggtgaggcagatcgcacctggtcagacgggcaacatcgccgactataattacaagctgcctgatgatttcacgggatgtgtcatcgcttggaacagcaacaagttggactccaaggtgagcgggaactataactacctgtaccgcttatttcggaagtccaacttgaagccgttcgagcgagacatatccacggagatctatcaggcaggcaataagccctgcaacggggtggcagggttcaattgttactttcccctgaggtcgtactctttccggcccacatacggggtggggcaccagccttacagggtggtggtgctatccttcgagttgctgcacgccccagccaccgtatgtgggccgaagaagagtacgaacctcgtgaagaacaagtgcgtcaacttcaacttcaacgggttgaaggggacgggcgtgctcacggagagtaacaagaaattcctgccattccagcagttcgggcgtgatatcgctgacaccaccgacgcggtgcgggatccccagaccctggagatcctggacatcacgccgtgcagcttcggtggtgtcagcgtgatcacgcccggcaccaacacctcgaaccaggtggcagtgctttaccagggtgtgaactgcactgaggtgcctgtggctatccacgccgatcagctgaccccaacgtggagggtgtactcgacagggagcaacgtcttccagacccgcgctggctgcctgattggcgctgagtacgtgaacaactcgtacgagtgcgacatccccattggggccggcatctgcgcgagttaccagacccagaccaagagccatcggagggcgagatcggtggcatcccagtcgatcatcgcctacacgatgagcctgggggccgagaacagcgtggcctacagcaacaacagcatcgctatccccacaaactttacaatcagtgtgaccaccgagatcttgcccgtcagcatgaccaagacctcggtggactgcactatgtacatctgtggggatagcaccgagtgttccaacctgctcctccagtacggctcgttctgcacgcaactgaagcgtgcattgacgggcatcgcggtggagcaggacaagaacactcaggaggtgtttgctcaggtcaagcagatctacaagacgcccccgatcaagtacttcgggggcttcaacttctcccagatcctgccggacccgagcaagccctccaagaggtccttcatcgaggacctcttgttcaacaaggtgactctcgcggatgccggcttcatcaaacagtatggggactgcctgggtgacatcgccgccagggacctgatctgcgcgcagaagttcaaggggctgacagtgctgcccccgctcctgacggacgagatgatcgctcagtacacgtccgcgctgttggcggggacgattacgagcggctggacgttcggagcgggggcagcactgcagatccctttcgcgatgcagatggcctacaggttcaatggcatcggtgtcacccagaacgtactctacgagaatcagaagctcatcgccaatcagttcaacagcgcgatcgggaagatccaggactccctgtcgagtacagcctccgcgttggggaagctgcaggacgtggttaaccacaacgcccaggccctgaacaccctggtgaagcagctgtcatccaagttcggggccatcagttcggtgctgaacgacatcttcagtcggctggaccccccggaggcggaggtccagatagatcgcctcatcaccgggcgcctccagagtttgcagacgtacgtgactcagcagctcatacgggctgctgagatacgtgcgtctgcaaacctggcggcgaccaagatgagcgagtgtgtacttggtcagagcaagcgggtcgacttctgcgggaagggctatcacctgatgtccttcccgcagagcgccccccacggggtggtcttcctgcacgtgacgtatgtgccggcgcaggagaagaacttcaccactgcgccggccatatgtcacgacgggaaggcccacttcccccgggagggcgtgttcgtgtcgaatgggacgcactggttcgtcacccagcggaacttctatgaaccacagataatcaccactgacaacaccttcgtcagtgggaactgcgatgtggtcataggaatcgtcaacaacacggtgtacgacccccttcagcccgagctggactcgttcaaggaggagctggacaaatacttcaagaaccacacgagcccggatgttgacctcggggacattagcggaatcaatgcctccgtggtcaacatccaaaaggagatcgacaggctcaacgaggtggccaagaacctcaacgagagcctgatcgatctccaggagctcggcaagtacgagcagtacatcaagtggccgtggtacatatggctggggttcatcgcagggctgatcgcgatcgtgatggtcacgatcatgctctgctgcatgacctcgtgctgctcgtgcttgaagggctgctgctcgtgtggttcttgctgcaagttcgacgaggacgattccgagccggtgctgaagggggtcaaactgcactacacctgataatctagattaagtgcttcccacttaaaacatatcaggccttctatttatttaaatatttaaattttatatttattgttgaatgtatggtttgctacctattgtaactattattcttaatcttaaaactataaatatggatcttttatgattctttttgtaagccctaggggctctaaaatggtttcacttatttatcccaaaat

SEQ ID NO: 173 - RNA, 4213 nt, synthetic construct
  source 1..4213: mol_type = other RNA
aggagttccctatcactctctttaatcactactcacagtaacctcaactcctgccacaatgttcgtgttcctggtgttgttgccgctggtgtcgagccagtgcgtcaacctgacgacacggacacagctgccccccgcgtacacgaactcgttcacgcggggggtgtactacccagacaaggtcttcaggagcagcgtgctgcacagcacgcaggacctcttcctcccgttcttctccaatgtcacgtggttccacgtgatatcggggacgaacgggacgaagaggttcgacaaccccgtgctcccgttcaatgacggggtgtacttcgcgtcgatcgagaagagtaacatcattcgagggtggatttttggcactaccctggactcgaagactcagagcctgctcatagtcaacaacgccaccaacgtggtgatcaaggtctgtgagttccagttctgcaacgacccgttcttggaccacaagaacaacaagagctggatggagtctgagtttcgagtctacagtagtgccaacaattgcaccttcgaatatgtgagccagccgttcctgatggacctggagggcaagcagggcaacttcaagaacttgcgcgagtttgtcttcaagaacatcgacggctacttcaagatctactcgaagcacaccccgatcattgtgcgggagccggaggacctgccgcagggcttcagcgctctggaaccgctggtggacttgcccatcggcatcaacatcacgcggttccagacgctgctggccctgcacaggtcctacctgactccgggagactcttcgtcggggtggaccgcgggtgcagccgcctactacgtgggctacctgcagccgcggacgttcttgttgaagtacaacgagaacggcacaatcaccgacgcggtggattgtgccctcgacccgctgagcgagaccaagtgcacactcaagagcttcacggtggagaaggggatctatcagacctccaacttccgggtccagccgactgagagcatcgttcggttcccgaacatcaccaacctgtgcccgtttgacgaggtgttcaacgccacgcggttcgcgtccgtgtacgcctggaaccggaaacggatctcgaactgcgtggcggactactcagtgttgtacaacctcgccccgttcttcaccttcaagtgctacggggtgagccccacaaagctgaacgacctctgcttcaccaacgtctacgcggatagcttcgtgatccgcggcgacgaggtgaggcagatcgcacctggtcagacgggcaacatcgccgactataattacaagctgcctgatgatttcacgggatgtgtcatcgcttggaacagcaacaagttggactccaaggtgagcgggaactataactacctgtaccgcttatttcggaagtccaacttgaagccgttcgagcgagacatatccacggagatctatcaggcaggcaataagccctgcaacggggtggcagggttcaattgttactttcccctgaggtcgtactctttccggcccacatacggggtggggcaccagccttacagggtggtggtgctatccttcgagttgctgcacgccccagccaccgtatgtgggccgaagaagagtacgaacctcgtgaagaacaagtgcgtcaacttcaacttcaacgggttgaaggggacgggcgtgctcacggagagtaacaagaaattcctgccattccagcagttcgggcgtgatatcgctgacaccaccgacgcggtgcgggatccccagaccctggagatcctggacatcacgccgtgcagcttcggtggtgtcagcgtgatcacgcccggcaccaacacctcgaaccaggtggcagtgctttaccagggtgtgaactgcactgaggtgcctgtggctatccacgccgatcagctgaccccaacgtggagggtgtactcgacagggagcaacgtcttccagacccgcgctggctgcctgattggcgctgagtacgtgaacaactcgtacgagtgcgacatccccattggggccggcatctgcgcgagttaccagacccagaccaagagccatcggagggcgagatcggtggcatcccagtcgatcatcgcctacacgatgagcctgggggccgagaacagcgtggcctacagcaacaacagcatcgctatccccacaaactttacaatcagtgtgaccaccgagatcttgcccgtcagcatgaccaagacctcggtggactgcactatgtacatctgtggggatagcaccgagtgttccaacctgctcctccagtacggctcgttctgcacgcaactgaagcgtgcattgacgggcatcgcggtggagcaggacaagaacactcaggaggtgtttgctcaggtcaagcagatctacaagacgcccccgatcaagtacttcgggggcttcaacttctcccagatcctgccggacccgagcaagccctccaagaggtccttcatcgaggacctcttgttcaacaaggtgactctcgcggatgccggcttcatcaaacagtatggggactgcctgggtgacatcgccgccagggacctgatctgcgcgcagaagttcaaggggctgacagtgctgcccccgctcctgacggacgagatgatcgctcagtacacgtccgcgctgttggcggggacgattacgagcggctggacgttcggagcgggggcagcactgcagatccctttcgcgatgcagatggcctacaggttcaatggcatcggtgtcacccagaacgtactctacgagaatcagaagctcatcgccaatcagttcaacagcgcgatcgggaagatccaggactccctgtcgagtacagcctccgcgttggggaagctgcaggacgtggttaaccacaacgcccaggccctgaacaccctggtgaagcagctgtcatccaagttcggggccatcagttcggtgctgaacgacatcttcagtcggctggaccccccggaggcggaggtccagatagatcgcctcatcaccgggcgcctccagagtttgcagacgtacgtgactcagcagctcatacgggctgctgagatacgtgcgtctgcaaacctggcggcgaccaagatgagcgagtgtgtacttggtcagagcaagcgggtcgacttctgcgggaagggctatcacctgatgtccttcccgcagagcgccccccacggggtggtcttcctgcacgtgacgtatgtgccggcgcaggagaagaacttcaccactgcgccggccatatgtcacgacgggaaggcccacttcccccgggagggcgtgttcgtgtcgaatgggacgcactggttcgtcacccagcggaacttctatgaaccacagataatcaccactgacaacaccttcgtcagtgggaactgcgatgtggtcataggaatcgtcaacaacacggtgtacgacccccttcagcccgagctggactcgttcaaggaggagctggacaaatacttcaagaaccacacgagcccggatgttgacctcggggacattagcggaatcaatgcctccgtggtcaacatccaaaaggagatcgacaggctcaacgaggtggccaagaacctcaacgagagcctgatcgatctccaggagctcggcaagtacgagcagtacatcaagtggccgtggtacatatggctggggttcatcgcagggctgatcgcgatcgtgatggtcacgatcatgctctgctgcatgacctcgtgctgctcgtgcttgaagggctgctgctcgtgtggttcttgctgcaagttcgacgaggacgattccgagccggtgctgaagggggtcaaactgcactacacctgataatctagattaagtgcttcccacttaaaacatatcaggccttctatttatttaaatatttaaattttatatttattgttgaatgtatggtttgctacctattgtaactattattcttaatcttaaaactataaatatggatcttttatgattctttttgtaagccctaggggctctaaaatggtttcacttatttatcccaaaatttcattgcaaaaaaaaaaaaaaaaaaaaaaaaaaaaaagcatatgactaaaaaaaaaaaaaaaaaaaaaaaaaaaaaaaaaaaaaaaaaaaaaaaaaaaaaaaaaaaaaaaaaaaaaaaaaaaaaaaaaaaaaaaa

SEQ ID NO: 174 - RNA, 3894 nt, synthetic construct; identical to SEQ ID NO: 119
  source 1..3894: mol_type = other RNA

SEQ ID NO: 175 - RNA, 3900 nt, synthetic construct
  source 1..3900: mol_type = other RNA
agaagctgtctatcgggctccagcggtcatgttcgtgtttctggtgctgctgcccctggtgagcagccagtgcgtgaacctgatcaccaggacccagagttacaccaacagcttcacccggggcgtgtactaccccgacaaggtgttcaggagcagcgtgctgcacagcacccaggacctgttcctgcccttcttcagcaacgtgacctggttccacgccatcagcggcaccaacggcaccaagcggttcgacaaccccgtgttgcccttcaacgacggcgtgtacttcgccagcaccgagaagagtaacatcatccggggctggatcttcggcaccaccctggactccaagacccagagcctgctgatcgtgaacaacgccaccaacgtggtgatcaaggtgtgcgagtttcagttctgcaacgaccccttcctggacgtgtactaccacaagaacaacaagagctggatggagagcgagttcagggtgtacagcagcgccaacaactgcaccttcgagtacgtgagccagcccttcctgatggacctggagggcaaacagggcaacttcaagaacctgcgggagttcgtgttcaagaatatcgacggctacttcaagatctacagcaagcacacccccatcaacctgggcagggacctgccccagggcttcagcgccctggagcccctggtggacctgcccatcggcatcaacatcacccggttccagaccctgctggccctgcaccggagctacctgacccccggcgacagcagcagcggctggaccgccggcgccgccgcctactacgtgggctacctgcagcccaggaccttcctgctgaagtacaacgagaacggcaccatcaccgacgccgtggactgtgccctggaccccctgagcgagaccaagtgcaccctgaagagtttcaccgtggagaagggcatctaccagaccagcaacttcagggtgcagcccaccgagagcatcgtgaggttccccaacatcaccaacctgtgccccttcgacgaggtgttcaacgccacccggttcgccagcgtgtacgcctggaaccggaagcggatcagcaactgcgtggccgactacagcgtgctgtacaacttcgcccccttcttcgccttcaagtgctacggcgtgagccccaccaaactgaacgacctatgcttcaccaacgtgtacgccgacagcttcgtgatcaggggtaacgaggtgagccagatcgcccccggccagaccggcaacatcgccgactacaactacaagctgcccgacgacttcaccggctgcgtgatcgcctggaacagcaacaagctggacagcaaggtgggcggcaactacaactaccggtacaggctgttccggaagagtaacctgaagcccttcgagagggacatcagcaccgagatctaccaagccggcaacaagccctgcaacggcgtggccggcgtgaactgctacttccccctgcagagctacggcttccggcccacctacggcgtgggccaccagccctaccgggtggtggtgctgagcttcgagctgctgcacgcccccgccaccgtgtgcggccccaagaagagtaccaacctggtgaagaataagtgcgtgaacttcaacttcaacggcctgaccggcaccggcgtgctgaccgagagcaacaagaagttcctgcccttccagcagttcggcagggacatcgccgacaccaccgacgccgtgcgggacccccagaccctggagatcctggacatcaccccctgcagcttcggcggcgtgagcgtgatcacccccggcaccaacaccagcaaccaggtggccgtgctgtaccagggcgtgaactgcaccgaggtgcccgtggccatccacgccgaccagctgacccccacctggcgggtgtacagcaccggcagcaacgtgttccagacccgagccggctgcctgatcggcgccgagtacgtgaacagcagctacgagtgcgacatccccatcggcgccggcatctgcgccagctaccagacacagaccaagagccacaggcgggcccggagcgtggccagccagagcatcatcgcctacaccatgagcctgggcgccgagaacagcgtcgcctacagcaacaacagcatcgccatcccgaccaacttcaccatcagcgtgaccaccgagatcctgcccgtgagcatgaccaagaccagcgtggactgcaccatgtacatctgcggcgacagcaccgagtgcagcaacctgctgctgcagtacggcagcttctgcacccagctgaagcgagccctgaccggcatcgccgtggagcaggacaagaacacccaggaggtgttcgcccaggtgaagcagatctacaagaccccccccataaagtacttcggcggcttcaacttcagccagatcctgcctgaccccagcaagcccagcaagcggagcttcatcgaggacctgctgttcaacaaggtgaccctggccgacgccggcttcatcaagcagtacggcgactgcctgggcgacatcgccgcccgggacctgatatgcgcccagaagttcaacggcctgaccgtgctgccccccctgctgaccgacgagatgatcgcccagtacaccagcgccctgctggccggcaccatcaccagcggctggacgttcggcgccggcgccgccctgcagatccccttcgccatgcagatggcctaccgcttcaacggcatcggcgtgacccagaacgtgctgtacgagaaccagaagctgatcgccaaccagttcaacagcgccatcggcaagatccaggacagcctgagcagcaccgccagcgccctgggcaagctgcaggacgtggtgaaccacaacgcccaggccctgaacaccctggtgaagcagctgagcagcaagttcggcgccatcagcagcgtgctgaacgacatcctgagccggctggacccccccgaggcggaggtgcagatcgacagactgatcaccggccggctgcagagcctgcagacctacgtgacccagcagctgatccgggccgccgagatccgggccagcgccaacctggccgccaccaagatgagcgagtgcgtgctgggccagtccaagcgggtggacttctgcggcaagggctaccacctgatgagcttcccccagagcgccccccacggcgtggtgttcctgcacgtgacctacgtgcccgcccaggagaagaacttcaccaccgcccccgccatctgccacgacggcaaggcccacttcccccgggagggcgtgttcgtgagcaacggcacccactggttcgtgacccagcggaacttctatgagccccagatcatcaccaccgacaacaccttcgtgagcggcaattgcgacgtggtgatcggcatcgtgaacaacaccgtgtacgaccccctgcagcccgagctggacagcttcaaggaggagctggacaagtacttcaagaaccacaccagccccgacgtggacctgggcgacatcagcggcatcaatgccagcgtggtgaacatccagaaggagatcgacaggctgaacgaggtggccaagaacctgaacgagagcctgatcgacctgcaggagctgggcaagtacgagcagtacatcaagtggccctggtacatctggctgggcttcatcgccggcctgatcgcaatcgtgatggtgaccatcatgctgtgctgcatgaccagctgctgcagctgcctgaagggctgctgcagctgcggcagctgctgcaagttcgacgaggacgacagcgagcccgtgctgaagggcgtgaagctgcactacacctgataatctagagccgccgctccagctttgcacgtttcgatcccaaaggccctttttagggccgacca

SEQ ID NO: 176 - RNA, 3903 nt, synthetic construct
  source 1..3903: mol_type = other RNA
aggagaagctgtctatcgggctccagcggtcatgttcgtgtttctggtgctgctgcccctggtgagcagccagtgcgtgaacctgatcaccaggacccagagttacaccaacagcttcacccggggcgtgtactaccccgacaaggtgttcaggagcagcgtgctgcacagcacccaggacctgttcctgcccttcttcagcaacgtgacctggttccacgccatcagcggcaccaacggcaccaagcggttcgacaaccccgtgttgcccttcaacgacggcgtgtacttcgccagcaccgagaagagtaacatcatccggggctggatcttcggcaccaccctggactccaagacccagagcctgctgatcgtgaacaacgccaccaacgtggtgatcaaggtgtgcgagtttcagttctgcaacgaccccttcctggacgtgtactaccacaagaacaacaagagctggatggagagcgagttcagggtgtacagcagcgccaacaactgcaccttcgagtacgtgagccagcccttcctgatggacctggagggcaaacagggcaacttcaagaacctgcgggagttcgtgttcaagaatatcgacggctacttcaagatctacagcaagcacacccccatcaacctgggcagggacctgccccagggcttcagcgccctggagcccctggtggacctgcccatcggcatcaacatcacccggttccagaccctgctggccctgcaccggagctacctgacccccggcgacagcagcagcggctggaccgccggcgccgccgcctactacgtgggctacctgcagcccaggaccttcctgctgaagtacaacgagaacggcaccatcaccgacgccgtggactgtgccctggaccccctgagcgagaccaagtgcaccctgaagagtttcaccgtggagaagggcatctaccagaccagcaacttcagggtgcagcccaccgagagcatcgtgaggttccccaacatcaccaacctgtgccccttcgacgaggtgttcaacgccacccggttcgccagcgtgtacgcctggaaccggaagcggatcagcaactgcgtggccgactacagcgtgctgtacaacttcgcccccttcttcgccttcaagtgctacggcgtgagccccaccaaactgaacgacctatgcttcaccaacgtgtacgccgacagcttcgtgatcaggggtaacgaggtgagccagatcgcccccggccagaccggcaacatcgccgactacaactacaagctgcccgacgacttcaccggctgcgtgatcgcctggaacagcaacaagctggacagcaaggtgggcggcaactacaactaccggtacaggctgttccggaagagtaacctgaagcccttcgagagggacatcagcaccgagatctaccaagccggcaacaagccctgcaacggcgtggccggcgtgaactgctacttccccctgcagagctacggcttccggcccacctacggcgtgggccaccagccctaccgggtggtggtgctgagcttcgagctgctgcacgcccccgccaccgtgtgcggccccaagaagagtaccaacctggtgaagaataagtgcgtgaacttcaacttcaacggcctgaccggcaccggcgtgctgaccgagagcaacaagaagttcctgcccttccagcagttcggcagggacatcgccgacaccaccgacgccgtgcgggacccccagaccctggagatcctggacatcaccccctgcagcttcggcggcgtgagcgtgatcacccccggcaccaacaccagcaaccaggtggccgtgctgtaccagggcgtgaactgcaccgaggtgcccgtggccatccacgccgaccagctgacccccacctggcgggtgtacagcaccggcagcaacgtgttccagacccgagccggctgcctgatcggcgccgagtacgtgaacagcagctacgagtgcgacatccccatcggcgccggcatctgcgccagctaccagacacagaccaagagccacaggcgggcccggagcgtggccagccagagcatcatcgcctacaccatgagcctgggcgccgagaacagcgtcgcctacagcaacaacagcatcgccatcccgaccaacttcaccatcagcgtgaccaccgagatcctgcccgtgagcatgaccaagaccagcgtggactgcaccatgtacatctgcggcgacagcaccgagtgcagcaacctgctgctgcagtacggcagcttctgcacccagctgaagcgagccctgaccggcatcgccgtggagcaggacaagaacacccaggaggtgttcgcccaggtgaagcagatctacaagaccccccccataaagtacttcggcggcttcaacttcagccagatcctgcctgaccccagcaagcccagcaagcggagcttcatcgaggacctgctgttcaacaaggtgaccctggccgacgccggcttcatcaagcagtacggcgactgcctgggcgacatcgccgcccgggacctgatatgcgcccagaagttcaacggcctgaccgtgctgccccccctgctgaccgacgagatgatcgcccagtacaccagcgccctgctggccggcaccatcaccagcggctggacgttcggcgccggcgccgccctgcagatccccttcgccatgcagatggcctaccgcttcaacggcatcggcgtgacccagaacgtgctgtacgagaaccagaagctgatcgccaaccagttcaacagcgccatcggcaagatccaggacagcctgagcagcaccgccagcgccctgggcaagctgcaggacgtggtgaaccacaacgcccaggccctgaacaccctggtgaagcagctgagcagcaagttcggcgccatcagcagcgtgctgaacgacatcctgagccggctggacccccccgaggcggaggtgcagatcgacagactgatcaccggccggctgcagagcctgcagacctacgtgacccagcagctgatccgggccgccgagatccgggccagcgccaacctggccgccaccaagatgagcgagtgcgtgctgggccagtccaagcgggtggacttctgcggcaagggctaccacctgatgagcttcccccagagcgccccccacggcgtggtgttcctgcacgtgacctacgtgcccgcccaggagaagaacttcaccaccgcccccgccatctgccacgacggcaaggcccacttcccccgggagggcgtgttcgtgagcaacggcacccactggttcgtgacccagcggaacttctatgagccccagatcatcaccaccgacaacaccttcgtgagcggcaattgcgacgtggtgatcggcatcgtgaacaacaccgtgtacgaccccctgcagcccgagctggacagcttcaaggaggagctggacaagtacttcaagaaccacaccagccccgacgtggacctgggcgacatcagcggcatcaatgccagcgtggtgaacatccagaaggagatcgacaggctgaacgaggtggccaagaacctgaacgagagcctgatcgacctgcaggagctgggcaagtacgagcagtacatcaagtggccctggtacatctggctgggcttcatcgccggcctgatcgcaatcgtgatggtgaccatcatgctgtgctgcatgaccagctgctgcagctgcctgaagggctgctgcagctgcggcagctgctgcaagttcgacgaggacgacagcgagcccgtgctgaagggcgtgaagctgcactacacctgataatctagagccgccgctccagctttgcacgtttcgatcccaaaggccctttttagggccgacca

SEQ ID NO: 177 - RNA, 3989 nt, synthetic construct; identical to SEQ ID NO: 121
  source 1..3989: mol_type = other RNA

SEQ ID NO: 178 - RNA, 3928 nt, synthetic construct
  source 1..3928: mol_type = other RNA
acgcgtgcctaaattaatacgactcactataaggagaagctgtctatcgggctccagcggtcatgtttgtgttcctggtgctgctgccactggtgagctctcagtgcgtgaatctgatcacacgcacccagagctacaccaacagcttcacccgcggggtgtactaccccgacaaggtgttcaggtcctccgtgctgcacagcacacaggacctgttcctgcccttcttcagcaacgtgacctggtttcacgccatcagcgggactaacggaaccaagaggttcgacaatcccgtgctgccatttaatgacggcgtgtacttcgccagcaccgagaagagtaacattatcaggggctggatctttggcaccacactggatagcaagacacagtccctgctgattgtgaacaacgctaccaacgtggtgatcaaagtgtgcgagtttcagttctgcaacgatccctttctggatgtgtactaccacaagaacaacaagtcctggatggagtccgagttccgggtctacagcagcgccaacaattgcaccttcgagtacgtgtcccagcccttcctgatggacctggagggcaagcaggggaacttcaagaacctgagggagttcgtgttcaagaacatcgacggatatttcaagatctactcgaagcacactcccatcaacctggggcgggacctgccccagggcttcagcgccctggaacccctggtcgatctgcccattggaattaatatcacacgctttcagaccctgctggctctgcaccggagctacctgacgccaggggacagctctagtggctggaccgccggggctgcggcctactacgtgggctacctgcagccccggacattcctgctgaagtacaacgagaacggcacgatcacagacgctgtggattgtgccctcgatcctctgtccgagaccaagtgtacactgaagagtttcaccgtggagaaggggatctaccagacctccaacttcagggtgcagccgaccgagagcattgtgcgcttcccaaacatcacaaacctgtgcccattcgacgaagtgttcaatgccactcggttcgcttcggtgtacgcttggaatcggaagaggatcagcaactgcgtggccgactactctgtgctgtacaacttcgccccattcttcgccttcaagtgctatggggtgtcccccacaaagctgaacgacctgtgcttcaccaacgtgtacgcggacagctttgtgatccgggggaacgaggtgtctcagattgctcccggccagacaggcaacatcgccgactacaattacaagctgcccgacgacttcacaggctgtgtgatcgcttggaactccaacaaactggactccaaggtgggcggcaactacaactacaggtaccgcctgttccggaagagtaatctgaagcccttcgagagggacatcagcacagagatctaccaggccggcaacaagccctgcaacggggtggccggggtgaactgctatttcccgctgcagagctacggatttcggcccacctacggggtggggcaccagccctaccgcgtggtggtgctgagcttcgagctgctgcacgccccggccaccgtgtgcgggcctaagaagagtaccaacctggtgaagaacaagtgtgtgaactttaatttcaatgggctgaccgggaccggggtgctgacagagagcaacaagaagttcctgcccttccagcagttcggccgggacatcgccgacaccaccgatgccgtccgggatccccagaccctggagatcctggacatcaccccctgcagctttgggggggtgtctgtgatcacacctgggacgaacacctccaaccaggtggcggtgctgtaccagggcgtgaattgcacggaggtgcccgtggcgattcacgccgaccagctgacccccacctggcgggtgtactccaccggctccaacgtgttccagaccagggccggctgtctgatcggagctgagtacgtgaattccagctacgagtgcgacatccccatcggagctggaatttgcgccagctaccagactcagaccaagagccaccggagggcccggagcgtggcctcccagagcatcatcgcctacacaatgagcctgggggccgagaactccgtggcctactccaacaacagcatcgctatccccacaaatttcaccatcagcgtgaccacagagatcctgccggtctccatgaccaagacctctgtggactgcacgatgtacatttgtggggatagcaccgagtgcagcaacctgctgctgcagtacggcagcttctgcactcagctgaagcgggccctgactggaatcgcggtggagcaggacaagaacacccaggaggtgtttgcccaggtgaagcagatctacaagacaccccccattaagtatttcggggggtttaacttcagccagatcctgccagacccatccaaaccgagcaagaggtccttcatcgaggacctcctgttcaacaaggtgaccctggcggacgctggcttcatcaagcagtacggcgactgcctgggcgacatcgctgcgagggacctgatctgcgctcagaagttcaatgggctgaccgtgctgccccccctgctcacggacgagatgatcgcccagtacacatccgctctcctggccggcaccattaccagcggatggaccttcggggctggagccgccctgcagatccctttcgccatgcagatggcctacaggttcaacgggatcggggtgactcagaatgtcctgtacgagaaccagaagctgatcgccaaccagttcaacagcgccatcgggaagattcaggacagcctgagctccacagcttccgccctggggaagctgcaggacgtggtgaaccacaacgctcaggccctgaacaccctggtgaagcagctgtcgagcaagttcggcgccatcagctcggtgctcaacgacattctgagtcgcctcgatccccctgaggccgaagtgcagatcgacaggctgatcacagggcggctccagtccctgcagacctacgtgactcagcagctcatcagggctgctgagatcagggcctccgccaacctggccgccaccaagatgagcgagtgtgtgctgggccagtccaaacgggtggacttctgtgggaagggctatcacctgatgtccttcccacagagcgccccccatggggtggtgttcctgcacgtgacatatgtgccagcgcaggagaagaacttcaccacagcgccggccatatgtcacgacggcaaggcgcacttccccagggagggcgtgttcgtgagcaacgggacccactggttcgtgacccagcggaacttctacgagccgcagatcatcaccaccgacaacaccttcgtgagcgggaactgcgacgtggtgatcggcatcgtgaacaacaccgtgtacgaccccctgcagcccgagctggactccttcaaggaggagctggacaagtacttcaagaaccacacgagccctgacgtggacctgggggacatctccgggatcaacgcctcggtggtgaacatccagaaagagatcgaccgcctgaacgaggtggccaagaacctgaacgagtccctgatcgacctgcaggagctggggaagtacgagcagtacattaaatggccctggtacatctggctggggttcatcgccggcctgatcgccatcgtgatggtgaccatcatgctgtgctgcatgaccagctgctgcagctgcctgaagggctgctgcagctgcgggtcgtgctgcaagttcgacgaggatgactccgagcccgtgctgaagggggtgaagctgcactacacctgataagccgccgctccagctttgcacgtttcgatcccaaaggccctttttagggccgacca

SEQ ID NO: 179 - RNA, 3934 nt, synthetic construct
  source 1..3934: mol_type = other RNA
acgcgtgcctaaattaatacgactcactataaggagaagctgtctatcgggctccagcggtcatgtttgtgttcctggtgctgctgccactggtgagctctcagtgcgtgaatctgatcacacgcacccagagctacaccaacagcttcacccgcggggtgtactaccccgacaaggtgttcaggtcctccgtgctgcacagcacacaggacctgttcctgcccttcttcagcaacgtgacctggtttcacgccatcagcgggactaacggaaccaagaggttcgacaatcccgtgctgccatttaatgacggcgtgtacttcgccagcaccgagaagagtaacattatcaggggctggatctttggcaccacactggatagcaagacacagtccctgctgattgtgaacaacgctaccaacgtggtgatcaaagtgtgcgagtttcagttctgcaacgatccctttctggatgtgtactaccacaagaacaacaagtcctggatggagtccgagttccgggtctacagcagcgccaacaattgcaccttcgagtacgtgtcccagcccttcctgatggacctggagggcaagcaggggaacttcaagaacctgagggagttcgtgttcaagaacatcgacggatatttcaagatctactcgaagcacactcccatcaacctggggcgggacctgccccagggcttcagcgccctggaacccctggtcgatctgcccattggaattaatatcacacgctttcagaccctgctggctctgcaccggagctacctgacgccaggggacagctctagtggctggaccgccggggctgcggcctactacgtgggctacctgcagccccggacattcctgctgaagtacaacgagaacggcacgatcacagacgctgtggattgtgccctcgatcctctgtccgagaccaagtgtacactgaagagtttcaccgtggagaaggggatctaccagacctccaacttcagggtgcagccgaccgagagcattgtgcgcttcccaaacatcacaaacctgtgcccattcgacgaagtgttcaatgccactcggttcgcttcggtgtacgcttggaatcggaagaggatcagcaactgcgtggccgactactctgtgctgtacaacttcgccccattcttcgccttcaagtgctatggggtgtcccccacaaagctgaacgacctgtgcttcaccaacgtgtacgcggacagctttgtgatccgggggaacgaggtgtctcagattgctcccggccagacaggcaacatcgccgactacaattacaagctgcccgacgacttcacaggctgtgtgatcgcttggaactccaacaaactggactccaaggtgggcggcaactacaactacaggtaccgcctgttccggaagagtaatctgaagcccttcgagagggacatcagcacagagatctaccaggccggcaacaagccctgcaacggggtggccggggtgaactgctatttcccgctgcagagctacggatttcggcccacctacggggtggggcaccagccctaccgcgtggtggtgctgagcttcgagctgctgcacgccccggccaccgtgtgcgggcctaagaagagtaccaacctggtgaagaacaagtgtgtgaactttaatttcaatgggctgaccgggaccggggtgctgacagagagcaacaagaagttcctgcccttccagcagttcggccgggacatcgccgacaccaccgatgccgtccgggatccccagaccctggagatcctggacatcaccccctgcagctttgggggggtgtctgtgatcacacctgggacgaacacctccaaccaggtggcggtgctgtaccagggcgtgaattgcacggaggtgcccgtggcgattcacgccgaccagctgacccccacctggcgggtgtactccaccggctccaacgtgttccagaccagggccggctgtctgatcggagctgagtacgtgaattccagctacgagtgcgacatccccatcggagctggaatttgcgccagctaccagactcagaccaagagccaccggagggcccggagcgtggcctcccagagcatcatcgcctacacaatgagcctgggggccgagaactccgtggcctactccaacaacagcatcgctatccccacaaatttcaccatcagcgtgaccacagagatcctgccggtctccatgaccaagacctctgtggactgcacgatgtacatttgtggggatagcaccgagtgcagcaacctgctgctgcagtacggcagcttctgcactcagctgaagcgggccctgactggaatcgcggtggagcaggacaagaacacccaggaggtgtttgcccaggtgaagcagatctacaagacaccccccattaagtatttcggggggtttaacttcagccagatcctgccagacccatccaaaccgagcaagaggtccttcatcgaggacctcctgttcaacaaggtgaccctggcggacgctggcttcatcaagcagtacggcgactgcctgggcgacatcgctgcgagggacctgatctgcgctcagaagttcaatgggctgaccgtgctgccccccctgctcacggacgagatgatcgcccagtacacatccgctctcctggccggcaccattaccagcggatggaccttcggggctggagccgccctgcagatccctttcgccatgcagatggcctacaggttcaacgggatcggggtgactcagaatgtcctgtacgagaaccagaagctgatcgccaaccagttcaacagcgccatcgggaagattcaggacagcctgagctccacagcttccgccctggggaagctgcaggacgtggtgaaccacaacgctcaggccctgaacaccctggtgaagcagctgtcgagcaagttcggcgccatcagctcggtgctcaacgacattctgagtcgcctcgatccccctgaggccgaagtgcagatcgacaggctgatcacagggcggctccagtccctgcagacctacgtgactcagcagctcatcagggctgctgagatcagggcctccgccaacctggccgccaccaagatgagcgagtgtgtgctgggccagtccaaacgggtggacttctgtgggaagggctatcacctgatgtccttcccacagagcgccccccatggggtggtgttcctgcacgtgacatatgtgccagcgcaggagaagaacttcaccacagcgccggccatatgtcacgacggcaaggcgcacttccccagggagggcgtgttcgtgagcaacgggacccactggttcgtgacccagcggaacttctacgagccgcagatcatcaccaccgacaacaccttcgtgagcgggaactgcgacgtggtgatcggcatcgtgaacaacaccgtgtacgaccccctgcagcccgagctggactccttcaaggaggagctggacaagtacttcaagaaccacacgagccctgacgtggacctgggggacatctccgggatcaacgcctcggtggtgaacatccagaaagagatcgaccgcctgaacgaggtggccaagaacctgaacgagtccctgatcgacctgcaggagctggggaagtacgagcagtacattaaatggccctggtacatctggctggggttcatcgccggcctgatcgccatcgtgatggtgaccatcatgctgtgctgcatgaccagctgctgcagctgcctgaagggctgctgcagctgcgggtcgtgctgcaagttcgacgaggatgactccgagcccgtgctgaagggggtgaagctgcactacacctgataatctagagccgccgctccagctttgcacgtttcgatcccaaaggccctttttagggccgacca

SEQ ID NO: 180 - RNA, 3903 nt, synthetic construct
  source 1..3903: mol_type = other RNA
aggagaagctgtctatcgggctccagcggtcatgtttgtgttcctggtgctgctgccactggtgagctctcagtgcgtgaatctgatcacacgcacccagagctacaccaacagcttcacccgcggggtgtactaccccgacaaggtgttcaggtcctccgtgctgcacagcacacaggacctgttcctgcccttcttcagcaacgtgacctggtttcacgccatcagcgggactaacggaaccaagaggttcgacaatcccgtgctgccatttaatgacggcgtgtacttcgccagcaccgagaagagtaacattatcaggggctggatctttggcaccacactggatagcaagacacagtccctgctgattgtgaacaacgctaccaacgtggtgatcaaagtgtgcgagtttcagttctgcaacgatccctttctggatgtgtactaccacaagaacaacaagtcctggatggagtccgagttccgggtctacagcagcgccaacaattgcaccttcgagtacgtgtcccagcccttcctgatggacctggagggcaagcaggggaacttcaagaacctgagggagttcgtgttcaagaacatcgacggatatttcaagatctactcgaagcacactcccatcaacctggggcgggacctgccccagggcttcagcgccctggaacccctggtcgatctgcccattggaattaatatcacacgctttcagaccctgctggctctgcaccggagctacctgacgccaggggacagctctagtggctggaccgccggggctgcggcctactacgtgggctacctgcagccccggacattcctgctgaagtacaacgagaacggcacgatcacagacgctgtggattgtgccctcgatcctctgtccgagaccaagtgtacactgaagagtttcaccgtggagaaggggatctaccagacctccaacttcagggtgcagccgaccgagagcattgtgcgcttcccaaacatcacaaacctgtgcccattcgacgaagtgttcaatgccactcggttcgcttcggtgtacgcttggaatcggaagaggatcagcaactgcgtggccgactactctgtgctgtacaacttcgccccattcttcgccttcaagtgctatggggtgtcccccacaaagctgaacgacctgtgcttcaccaacgtgtacgcggacagctttgtgatccgggggaacgaggtgtctcagattgctcccggccagacaggcaacatcgccgactacaattacaagctgcccgacgacttcacaggctgtgtgatcgcttggaactccaacaaactggactccaaggtgggcggcaactacaactacaggtaccgcctgttccggaagagtaatctgaagcccttcgagagggacatcagcacagagatctaccaggccggcaacaagccctgcaacggggtggccggggtgaactgctatttcccgctgcagagctacggatttcggcccacctacggggtggggcaccagccctaccgcgtggtggtgctgagcttcgagctgctgcacgccccggccaccgtgtgcgggcctaagaagagtaccaacctggtgaagaacaagtgtgtgaactttaatttcaatgggctgaccgggaccggggtgctgacagagagcaacaagaagttcctgcccttccagcagttcggccgggacatcgccgacaccaccgatgccgtccgggatccccagaccctggagatcctggacatcaccccctgcagctttgggggggtgtctgtgatcacacctgggacgaacacctccaaccaggtggcggtgctgtaccagggcgtgaattgcacggaggtgcccgtggcgattcacgccgaccagctgacccccacctggcgggtgtactccaccggctccaacgtgttccagaccagggccggctgtctgatcggagctgagtacgtgaattccagctacgagtgcgacatccccatcggagctggaatttgcgccagctaccagactcagaccaagagccaccggagggcccggagcgtggcctcccagagcatcatcgcctacacaatgagcctgggggccgagaactccgtggcctactccaacaacagcatcgctatccccacaaatttcaccatcagcgtgaccacagagatcctgccggtctccatgaccaagacctctgtggactgcacgatgtacatttgtggggatagcaccgagtgcagcaacctgctgctgcagtacggcagcttctgcactcagctgaagcgggccctgactggaatcgcggtggagcaggacaagaacacccaggaggtgtttgcccaggtgaagcagatctacaagacaccccccattaagtatttcggggggtttaacttcagccagatcctgccagacccatccaaaccgagcaagaggtccttcatcgaggacctcctgttcaacaaggtgaccctggcggacgctggcttcatcaagcagtacggcgactgcctgggcgacatcgctgcgagggacctgatctgcgctcagaagttcaatgggctgaccgtgctgccccccctgctcacggacgagatgatcgcccagtacacatccgctctcctggccggcaccattaccagcggatggaccttcggggctggagccgccctgcagatccctttcgccatgcagatggcctacaggttcaacgggatcggggtgactcagaatgtcctgtacgagaaccagaagctgatcgccaaccagttcaacagcgccatcgggaagattcaggacagcctgagctccacagcttccgccctggggaagctgcaggacgtggtgaaccacaacgctcaggccctgaacaccctggtgaagcagctgtcgagcaagttcggcgccatcagctcggtgctcaacgacattctgagtcgcctcgatccccctgaggccgaagtgcagatcgacaggctgatcacagggcggctccagtccctgcagacctacgtgactcagcagctcatcagggctgctgagatcagggcctccgccaacctggccgccaccaagatgagcgagtgtgtgctgggccagtccaaacgggtggacttctgtgggaagggctatcacctgatgtccttcccacagagcgccccccatggggtggtgttcctgcacgtgacatatgtgccagcgcaggagaagaacttcaccacagcgccggccatatgtcacgacggcaaggcgcacttccccagggagggcgtgttcgtgagcaacgggacccactggttcgtgacccagcggaacttctacgagccgcagatcatcaccaccgacaacaccttcgtgagcgggaactgcgacgtggtgatcggcatcgtgaacaacaccgtgtacgaccccctgcagcccgagctggactccttcaaggaggagctggacaagtacttcaagaaccacacgagccctgacgtggacctgggggacatctccgggatcaacgcctcggtggtgaacatccagaaagagatcgaccgcctgaacgaggtggccaagaacctgaacgagtccctgatcgacctgcaggagctggggaagtacgagcagtacattaaatggccctggtacatctggctggggttcatcgccggcctgatcgccatcgtgatggtgaccatcatgctgtgctgcatgaccagctgctgcagctgcctgaagggctgctgcagctgcgggtcgtgctgcaagttcgacgaggatgactccgagcccgtgctgaagggggtgaagctgcactacacctgataatctagagccgccgctccagctttgcacgtttcgatcccaaaggccctttttagggccgacca

SEQ ID NO: 181 - RNA, 3989 nt, synthetic construct
  source 1..3989: mol_type = other RNA
aggagaagctgtctatcgggctccagcggtcatgtttgtgttcctggtgctgctgccactggtgagctctcagtgcgtgaatctgatcacacgcacccagagctacaccaacagcttcacccgcggggtgtactaccccgacaaggtgttcaggtcctccgtgctgcacagcacacaggacctgttcctgcccttcttcagcaacgtgacctggtttcacgccatcagcgggactaacggaaccaagaggttcgacaatcccgtgctgccatttaatgacggcgtgtacttcgccagcaccgagaagagtaacattatcaggggctggatctttggcaccacactggatagcaagacacagtccctgctgattgtgaacaacgctaccaacgtggtgatcaaagtgtgcgagtttcagttctgcaacgatccctttctggatgtgtactaccacaagaacaacaagtcctggatggagtccgagttccgggtctacagcagcgccaacaattgcaccttcgagtacgtgtcccagcccttcctgatggacctggagggcaagcaggggaacttcaagaacctgagggagttcgtgttcaagaacatcgacggatatttcaagatctactcgaagcacactcccatcaacctggggcgggacctgccccagggcttcagcgccctggaacccctggtcgatctgcccattggaattaatatcacacgctttcagaccctgctggctctgcaccggagctacctgacgccaggggacagctctagtggctggaccgccggggctgcggcctactacgtgggctacctgcagccccggacattcctgctgaagtacaacgagaacggcacgatcacagacgctgtggattgtgccctcgatcctctgtccgagaccaagtgtacactgaagagtttcaccgtggagaaggggatctaccagacctccaacttcagggtgcagccgaccgagagcattgtgcgcttcccaaacatcacaaacctgtgcccattcgacgaagtgttcaatgccactcggttcgcttcggtgtacgcttggaatcggaagaggatcagcaactgcgtggccgactactctgtgctgtacaacttcgccccattcttcgccttcaagtgctatggggtgtcccccacaaagctgaacgacctgtgcttcaccaacgtgtacgcggacagctttgtgatccgggggaacgaggtgtctcagattgctcccggccagacaggcaacatcgccgactacaattacaagctgcccgacgacttcacaggctgtgtgatcgcttggaactccaacaaactggactccaaggtgggcggcaactacaactacaggtaccgcctgttccggaagagtaatctgaagcccttcgagagggacatcagcacagagatctaccaggccggcaacaagccctgcaacggggtggccggggtgaactgctatttcccgctgcagagctacggatttcggcccacctacggggtggggcaccagccctaccgcgtggtggtgctgagcttcgagctgctgcacgccccggccaccgtgtgcgggcctaagaagagtaccaacctggtgaagaacaagtgtgtgaactttaatttcaatgggctgaccgggaccggggtgctgacagagagcaacaagaagttcctgcccttccagcagttcggccgggacatcgccgacaccaccgatgccgtccgggatccccagaccctggagatcctggacatcaccccctgcagctttgggggggtgtctgtgatcacacctgggacgaacacctccaaccaggtggcggtgctgtaccagggcgtgaattgcacggaggtgcccgtggcgattcacgccgaccagctgacccccacctggcgggtgtactccaccggctccaacgtgttccagaccagggccggctgtctgatcggagctgagtacgtgaattccagctacgagtgcgacatccccatcggagctggaatttgcgccagctaccagactcagaccaagagccaccggagggcccggagcgtggcctcccagagcatcatcgcctacacaatgagcctgggggccgagaactccgtggcctactccaacaacagcatcgctatccccacaaatttcaccatcagcgtgaccacagagatcctgccggtctccatgaccaagacctctgtggactgcacgatgtacatttgtggggatagcaccgagtgcagcaacctgctgctgcagtacggcagcttctgcactcagctgaagcgggccctgactggaatcgcggtggagcaggacaagaacacccaggaggtgtttgcccaggtgaagcagatctacaagacaccccccattaagtatttcggggggtttaacttcagccagatcctgccagacccatccaaaccgagcaagaggtccttcatcgaggacctcctgttcaacaaggtgaccctggcggacgctggcttcatcaagcagtacggcgactgcctgggcgacatcgctgcgagggacctgatctgcgctcagaagttcaatgggctgaccgtgctgccccccctgctcacggacgagatgatcgcccagtacacatccgctctcctggccggcaccattaccagcggatggaccttcggggctggagccgccctgcagatccctttcgccatgcagatggcctacaggttcaacgggatcggggtgactcagaatgtcctgtacgagaaccagaagctgatcgccaaccagttcaacagcgccatcgggaagattcaggacagcctgagctccacagcttccgccctggggaagctgcaggacgtggtgaaccacaacgctcaggccctgaacaccctggtgaagcagctgtcgagcaagttcggcgccatcagctcggtgctcaacgacattctgagtcgcctcgatccccctgaggccgaagtgcagatcgacaggctgatcacagggcggctccagtccctgcagacctacgtgactcagcagctcatcagggctgctgagatcagggcctccgccaacctggccgccaccaagatgagcgagtgtgtgctgggccagtccaaacgggtggacttctgtgggaagggctatcacctgatgtccttcccacagagcgccccccatggggtggtgttcctgcacgtgacatatgtgccagcgcaggagaagaacttcaccacagcgccggccatatgtcacgacggcaaggcgcacttccccagggagggcgtgttcgtgagcaacgggacccactggttcgtgacccagcggaacttctacgagccgcagatcatcaccaccgacaacaccttcgtgagcgggaactgcgacgtggtgatcggcatcgtgaacaacaccgtgtacgaccccctgcagcccgagctggactccttcaaggaggagctggacaagtacttcaagaaccacacgagccctgacgtggacctgggggacatctccgggatcaacgcctcggtggtgaacatccagaaagagatcgaccgcctgaacgaggtggccaagaacctgaacgagtccctgatcgacctgcaggagctggggaagtacgagcagtacattaaatggccctggtacatctggctggggttcatcgccggcctgatcgccatcgtgatggtgaccatcatgctgtgctgcatgaccagctgctgcagctgcctgaagggctgctgcagctgcgggtcgtgctgcaagttcgacgaggatgactccgagcccgtgctgaagggggtgaagctgcactacacctgataatctagagccgccgctccagctttgcacgtttcgatcccaaaggccctttttagggccgaccattcattgcaaaaaaaaaaaaaaaaaaaaaaaaaaaaaagcatatgactaaaaaaaaaaaaaaaaaaaaaaaaaaaaaaaaaaaaaa

SEQ ID NO: 182 - RNA, 3894 nt, synthetic construct
  source 1..3894: mol_type = other RNA
agaagctgtctatcgggctccagcggtcatgtttgtgttcctggtgctgctccccctggtcagctcacagtgcgtcaacctcatcaccaggactcagagctacaccaacagtttcactcggggggtctactaccccgacaaggtgttcaggagcagcgtcctgcacagcacgcaggacctgttcctgccgttcttcagcaacgtgacctggtttcacgccatcagtgggaccaacgggacgaagaggttcgataatcccgtgctcccattcaacgatggcgtgtacttcgccagcacggagaagagtaacatcatcaggggctggatctttgggaccacactggactcaaagacccagtccctgctgatcgtgaataacgccaccaatgtggtgattaaggtgtgcgagttccagttctgtaatgacccctttctcgacgtgtactaccacaagaacaacaagtcctggatggagagcgagttccgggtgtacagcagcgccaacaactgtacattcgagtatgtctcccagcccttcctgatggacctcgaggggaagcagggcaactttaagaacctgagggagttcgtgttcaagaacatcgacgggtacttcaagatctactcgaagcacacccccatcaatctgggacgcgacctccctcagggcttcagcgccctggagcccctcgtggacctgcccattggaatcaacatcaccaggttccagacgctcctggccctgcacaggagctacctgacacctggtgacagctccagtgggtggactgcaggtgccgccgcctactacgtggggtacctgcagcccaggacgttcctgctgaagtacaacgagaatgggaccattacagacgctgtggactgcgcactggaccccttaagcgagaccaagtgtactctgaagtccttcaccgtcgagaagggcatctatcagaccagcaatttcagagtccagccaactgagagcatcgtgaggttccccaacatcacaaacctgtgtccctttgacgaggtgttcaacgccacccggttcgcctccgtgtacgcctggaatcgcaagagaatcagcaactgtgtcgcagattattcagtgctgtacaacttcgccccattcttcgccttcaagtgctatggggtgagccccacaaagctgaatgatctgtgcttcacaaacgtgtatgctgattcttttgtgattcgaggcaacgaggtgagccagattgccccagggcagaccgggaacatcgcggactataattataagctccccgacgactttaccggctgcgtgattgcctggaacagcaataagctcgacagcaaggtcggggggaattataattataggtaccgcctgttccgaaagtccaacctgaagcccttcgagcgggatatctccacggagatctaccaggctggcaacaagccctgcaacggcgtggcaggggtgaactgctacttccccctgcagagctacgggttcaggcccacctacggggtggggcaccagccctaccgcgtggtggtcctgagcttcgagctcctgcacgcccccgcaacagtgtgcggtccaaagaagtccaccaacctggtgaagaataagtgcgtgaacttcaacttcaacggactcaccgggaccggcgtcctgaccgagtccaacaagaagttcctgcccttccagcagttcggcagagacatcgccgacactacggacgcggtccgggatccccagaccctggagatcctggacatcacgccctgtagtttcggcggtgtctctgtcattactcccgggaccaatacatccaaccaggtggcggtgctgtaccagggcgtgaattgcacggaggtgcccgtggcaattcacgccgaccagctgacccccacctggcgggtgtacagcaccgggagtaacgtgtttcagacacgggcaggatgtctgattggcgctgagtatgtgaacagcagctacgagtgcgacattcccatcggcgcggggatctgcgctagctatcagacccagaccaagagccacaggagggctcgctctgtggcctcacagagcatcatcgcctacacgatgagtctgggcgctgaaaacagcgtggcctactccaacaacagcatcgccatccctaccaacttcaccatctcagtgaccacagagatcctgcccgtgtccatgacaaagacttccgtggactgcaccatgtacatctgcggggacagcaccgagtgttccaacctcctgctccagtacggcagtttctgtacacagctcaagcgggccctgacaggaattgccgtggagcaggacaagaacactcaggaggtgtttgcccaggtcaagcagatctacaagacaccccccatcaagtacttcggggggttcaacttctcccagatcctgcccgaccccagcaagccctccaagaggagctttattgaagacctgctctttaataaggtgactctcgccgacgcagggttcatcaagcagtacggggactgcctgggggatatcgccgctcgagatctcatctgtgcccagaagttcaacgggctgaccgtcctgccccccctgctcacagatgagatgatcgcccagtacaccagcgccctgctggctgggaccatcacttcaggttggacgttcggagctggcgccgccctgcagatcccattcgccatgcagatggcctacaggttcaacgggatcggggtgactcagaatgtcctgtacgagaaccagaagctgattgccaaccagtttaactcagccatcgggaagattcaggacagcctgagcagcaccgcatccgccctggggaagctccaggatgtggtgaaccacaacgctcaggccctgaacaccctggtgaagcagctgagctccaagttcggggcaatcagctcggtcctcaacgacattctgagtcgcctcgatccccccgaggctgaggtccagatcgaccggctgatcactggtcggctgcagagtctgcagacctacgtgactcagcagctgatcagggcagccgagatccgggcctcagccaacctggcagccaccaagatgtccgagtgtgtcctggggcagtctaagcgggtggacttctgtgggaagggctaccacctgatgtccttcccacagagcgcaccccacggggtggtgttcctccacgtgacctacgtgcccgcacaggagaagaacttcaccaccgccccggccatctgccacgatggcaaggcccacttcccccgggaaggggtcttcgtgtcaaacgggacacactggtttgtgacccagcggaacttctacgagcctcagatcatcaccactgacaacaccttcgtcagtgggaactgcgacgtggtcatcggtattgtgaacaataccgtgtacgacccactgcagcccgagctcgactccttcaaggaggagctcgacaagtacttcaaaaaccatacttccccagacgtggacctgggcgacatcagcggcatcaacgccagcgtcgtcaatatccagaaggagatcgacaggctcaatgaggtggccaagaacctcaatgagagcctgatcgatctccaggaactggggaagtatgagcagtacatcaagtggccttggtacatctggctgggcttcatcgctggtctgattgccatcgtgatggtgaccattatgctgtgctgcatgaccagctgctgcagctgcctgaagggctgctgcagctgcgggtcatgctgcaagttcgatgaggacgacagcgagcctgtcctgaagggggtcaagctgcactacacctgataagccgccgctccagctttgcacgtttcgatcccaaaggccctttttagggccgacca

SEQ ID NO: 183 - RNA, 3900 nt, synthetic construct
  source 1..3900: mol_type = other RNA
agaagctgtctatcgggctccagcggtcatgtttgtgttcctggtgctgctccccctggtcagctcacagtgcgtcaacctcatcaccaggactcagagctacaccaacagtttcactcggggggtctactaccccgacaaggtgttcaggagcagcgtcctgcacagcacgcaggacctgttcctgccgttcttcagcaacgtgacctggtttcacgccatcagtgggaccaacgggacgaagaggttcgataatcccgtgctcccattcaacgatggcgtgtacttcgccagcacggagaagagtaacatcatcaggggctggatctttgggaccacactggactcaaagacccagtccctgctgatcgtgaataacgccaccaatgtggtgattaaggtgtgcgagttccagttctgtaatgacccctttctcgacgtgtactaccacaagaacaacaagtcctggatggagagcgagttccgggtgtacagcagcgccaacaactgtacattcgagtatgtctcccagcccttcctgatggacctcgaggggaagcagggcaactttaagaacctgagggagttcgtgttcaagaacatcgacgggtacttcaagatctactcgaagcacacccccatcaatctgggacgcgacctccctcagggcttcagcgccctggagcccctcgtggacctgcccattggaatcaacatcaccaggttccagacgctcctggccctgcacaggagctacctgacacctggtgacagctccagtgggtggactgcaggtgccgccgcctactacgtggggtacctgcagcccaggacgttcctgctgaagtacaacgagaatgggaccattacagacgctgtggactgcgcactggaccccttaagcgagaccaagtgtactctgaagtccttcaccgtcgagaagggcatctatcagaccagcaatttcagagtccagccaactgagagcatcgtgaggttccccaacatcacaaacctgtgtccctttgacgaggtgttcaacgccacccggttcgcctccgtgtacgcctggaatcgcaagagaatcagcaactgtgtcgcagattattcagtgctgtacaacttcgccccattcttcgccttcaagtgctatggggtgagccccacaaagctgaatgatctgtgcttcacaaacgtgtatgctgattcttttgtgattcgaggcaacgaggtgagccagattgccccagggcagaccgggaacatcgcggactataattataagctccccgacgactttaccggctgcgtgattgcctggaacagcaataagctcgacagcaaggtcggggggaattataattataggtaccgcctgttccgaaagtccaacctgaagcccttcgagcgggatatctccacggagatctaccaggctggcaacaagccctgcaacggcgtggcaggggtgaactgctacttccccctgcagagctacgggttcaggcccacctacggggtggggcaccagccctaccgcgtggtggtcctgagcttcgagctcctgcacgcccccgcaacagtgtgcggtccaaagaagtccaccaacctggtgaagaataagtgcgtgaacttcaacttcaacggactcaccgggaccggcgtcctgaccgagtccaacaagaagttcctgcccttccagcagttcggcagagacatcgccgacactacggacgcggtccgggatccccagaccctggagatcctggacatcacgccctgtagtttcggcggtgtctctgtcattactcccgggaccaatacatccaaccaggtggcggtgctgtaccagggcgtgaattgcacggaggtgcccgtggcaattcacgccgaccagctgacccccacctggcgggtgtacagcaccgggagtaacgtgtttcagacacgggcaggatgtctgattggcgctgagtatgtgaacagcagctacgagtgcgacattcccatcggcgcggggatctgcgctagctatcagacccagaccaagagccacaggagggctcgctctgtggcctcacagagcatcatcgcctacacgatgagtctgggcgctgaaaacagcgtggcctactccaacaacagcatcgccatccctaccaacttcaccatctcagtgaccacagagatcctgcccgtgtccatgacaaagacttccgtggactgcaccatgtacatctgcggggacagcaccgagtgttccaacctcctgctccagtacggcagtttctgtacacagctcaagcgggccctgacaggaattgccgtggagcaggacaagaacactcaggaggtgtttgcccaggtcaagcagatctacaagacaccccccatcaagtacttcggggggttcaacttctcccagatcctgcccgaccccagcaagccctccaagaggagctttattgaagacctgctctttaataaggtgactctcgccgacgcagggttcatcaagcagtacggggactgcctgggggatatcgccgctcgagatctcatctgtgcccagaagttcaacgggctgaccgtcctgccccccctgctcacagatgagatgatcgcccagtacaccagcgccctgctggctgggaccatcacttcaggttggacgttcggagctggcgccgccctgcagatcccattcgccatgcagatggcctacaggttcaacgggatcggggtgactcagaatgtcctgtacgagaaccagaagctgattgccaaccagtttaactcagccatcgggaagattcaggacagcctgagcagcaccgcatccgccctggggaagctccaggatgtggtgaaccacaacgctcaggccctgaacaccctggtgaagcagctgagctccaagttcggggcaatcagctcggtcctcaacgacattctgagtcgcctcgatccccccgaggctgaggtccagatcgaccggctgatcactggtcggctgcagagtctgcagacctacgtgactcagcagctgatcagggcagccgagatccgggcctcagccaacctggcagccaccaagatgtccgagtgtgtcctggggcagtctaagcgggtggacttctgtgggaagggctaccacctgatgtccttcccacagagcgcaccccacggggtggtgttcctccacgtgacctacgtgcccgcacaggagaagaacttcaccaccgccccggccatctgccacgatggcaaggcccacttcccccgggaaggggtcttcgtgtcaaacgggacacactggtttgtgacccagcggaacttctacgagcctcagatcatcaccactgacaacaccttcgtcagtgggaactgcgacgtggtcatcggtattgtgaacaataccgtgtacgacccactgcagcccgagctcgactccttcaaggaggagctcgacaagtacttcaaaaaccatacttccccagacgtggacctgggcgacatcagcggcatcaacgccagcgtcgtcaatatccagaaggagatcgacaggctcaatgaggtggccaagaacctcaatgagagcctgatcgatctccaggaactggggaagtatgagcagtacatcaagtggccttggtacatctggctgggcttcatcgctggtctgattgccatcgtgatggtgaccattatgctgtgctgcatgaccagctgctgcagctgcctgaagggctgctgcagctgcgggtcatgctgcaagttcgatgaggacgacagcgagcctgtcctgaagggggtcaagctgcactacacctgataatctagagccgccgctccagctttgcacgtttcgatcccaaaggccctttttagggccgacca

SEQ ID NO: 184 - RNA, 3903 nt, synthetic construct
  source 1..3903: mol_type = other RNA
aggagaagctgtctatcgggctccagcggtcatgtttgtgttcctggtgctgctccccctggtcagctcacagtgcgtcaacctcatcaccaggactcagagctacaccaacagtttcactcggggggtctactaccccgacaaggtgttcaggagcagcgtcctgcacagcacgcaggacctgttcctgccgttcttcagcaacgtgacctggtttcacgccatcagtgggaccaacgggacgaagaggttcgataatcccgtgctcccattcaacgatggcgtgtacttcgccagcacggagaagagtaacatcatcaggggctggatctttgggaccacactggactcaaagacccagtccctgctgatcgtgaataacgccaccaatgtggtgattaaggtgtgcgagttccagttctgtaatgacccctttctcgacgtgtactaccacaagaacaacaagtcctggatggagagcgagttccgggtgtacagcagcgccaacaactgtacattcgagtatgtctcccagcccttcctgatggacctcgaggggaagcagggcaactttaagaacctgagggagttcgtgttcaagaacatcgacgggtacttcaagatctactcgaagcacacccccatcaatctgggacgcgacctccctcagggcttcagcgccctggagcccctcgtggacctgcccattggaatcaacatcaccaggttccagacgctcctggccctgcacaggagctacctgacacctggtgacagctccagtgggtggactgcaggtgccgccgcctactacgtggggtacctgcagcccaggacgttcctgctgaagtacaacgagaatgggaccattacagacgctgtggactgcgcactggaccccttaagcgagaccaagtgtactctgaagtccttcaccgtcgagaagggcatctatcagaccagcaatttcagagtccagccaactgagagcatcgtgaggttccccaacatcacaaacctgtgtccctttgacgaggtgttcaacgccacccggttcgcctccgtgtacgcctggaatcgcaagagaatcagcaactgtgtcgcagattattcagtgctgtacaacttcgccccattcttcgccttcaagtgctatggggtgagccccacaaagctgaatgatctgtgcttcacaaacgtgtatgctgattcttttgtgattcgaggcaacgaggtgagccagattgccccagggcagaccgggaacatcgcggactataattataagctccccgacgactttaccggctgcgtgattgcctggaacagcaataagctcgacagcaaggtcggggggaattataattataggtaccgcctgttccgaaagtccaacctgaagcccttcgagcgggatatctccacggagatctaccaggctggcaacaagccctgcaacggcgtggcaggggtgaactgctacttccccctgcagagctacgggttcaggcccacctacggggtggggcaccagccctaccgcgtggtggtcctgagcttcgagctcctgcacgcccccgcaacagtgtgcggtccaaagaagtccaccaacctggtgaagaataagtgcgtgaacttcaacttcaacggactcaccgggaccggcgtcctgaccgagtccaacaagaagttcctgcccttccagcagttcggcagagacatcgccgacactacggacgcggtccgggatccccagaccctggagatcctggacatcacgccctgtagtttcggcggtgtctctgtcattactcccgggaccaatacatccaaccaggtggcggtgctgtaccagggcgtgaattgcacggaggtgcccgtggcaattcacgccgaccagctgacccccacctggcgggtgtacagcaccgggagtaacgtgtttcagacacgggcaggatgtctgattggcgctgagtatgtgaacagcagctacgagtgcgacattcccatcggcgcggggatctgcgctagctatcagacccagaccaagagccacaggagggctcgctctgtggcctcacagagcatcatcgcctacacgatgagtctgggcgctgaaaacagcgtggcctactccaacaacagcatcgccatccctaccaacttcaccatctcagtgaccacagagatcctgcccgtgtccatgacaaagacttccgtggactgcaccatgtacatctgcggggacagcaccgagtgttccaacctcctgctccagtacggcagtttctgtacacagctcaagcgggccctgacaggaattgccgtggagcaggacaagaacactcaggaggtgtttgcccaggtcaagcagatctacaagacaccccccatcaagtacttcggggggttcaacttctcccagatcctgcccgaccccagcaagccctccaagaggagctttattgaagacctgctctttaataaggtgactctcgccgacgcagggttcatcaagcagtacggggactgcctgggggatatcgccgctcgagatctcatctgtgcccagaagttcaacgggctgaccgtcctgccccccctgctcacagatgagatgatcgcccagtacaccagcgccctgctggctgggaccatcacttcaggttggacgttcggagctggcgccgccctgcagatcccattcgccatgcagatggcctacaggttcaacgggatcggggtgactcagaatgtcctgtacgagaaccagaagctgattgccaaccagtttaactcagccatcgggaagattcaggacagcctgagcagcaccgcatccgccctggggaagctccaggatgtggtgaaccacaacgctcaggccctgaacaccctggtgaagcagctgagctccaagttcggggcaatcagctcggtcctcaacgacattctgagtcgcctcgatccccccgaggctgaggtccagatcgaccggctgatcactggtcggctgcagagtctgcagacctacgtgactcagcagctgatcagggcagccgagatccgggcctcagccaacctggcagccaccaagatgtccgagtgtgtcctggggcagtctaagcgggtggacttctgtgggaagggctaccacctgatgtccttcccacagagcgcaccccacggggtggtgttcctccacgtgacctacgtgcccgcacaggagaagaacttcaccaccgccccggccatctgccacgatggcaaggcccacttcccccgggaaggggtcttcgtgtcaaacgggacacactggtttgtgacccagcggaacttctacgagcctcagatcatcaccactgacaacaccttcgtcagtgggaactgcgacgtggtcatcggtattgtgaacaataccgtgtacgacccactgcagcccgagctcgactccttcaaggaggagctcgacaagtacttcaaaaaccatacttccccagacgtggacctgggcgacatcagcggcatcaacgccagcgtcgtcaatatccagaaggagatcgacaggctcaatgaggtggccaagaacctcaatgagagcctgatcgatctccaggaactggggaagtatgagcagtacatcaagtggccttggtacatctggctgggcttcatcgctggtctgattgccatcgtgatggtgaccattatgctgtgctgcatgaccagctgctgcagctgcctgaagggctgctgcagctgcgggtcatgctgcaagttcgatgaggacgacagcgagcctgtcctgaagggggtcaagctgcactacacctgataatctagagccgccgctccagctttgcacgtttcgatcccaaaggccctttttagggccgacca

SEQ ID NO: 185 - RNA, 3989 nt, synthetic construct
  source 1..3989: mol_type = other RNA
aggagaagctgtctatcgggctccagcggtcatgtttgtgttcctggtgctgctccccctggtcagctcacagtgcgtcaacctcatcaccaggactcagagctacaccaacagtttcactcggggggtctactaccccgacaaggtgttcaggagcagcgtcctgcacagcacgcaggacctgttcctgccgttcttcagcaacgtgacctggtttcacgccatcagtgggaccaacgggacgaagaggttcgataatcccgtgctcccattcaacgatggcgtgtacttcgccagcacggagaagagtaacatcatcaggggctggatctttgggaccacactggactcaaagacccagtccctgctgatcgtgaataacgccaccaatgtggtgattaaggtgtgcgagttccagttctgtaatgacccctttctcgacgtgtactaccacaagaacaacaagtcctggatggagagcgagttccgggtgtacagcagcgccaacaactgtacattcgagtatgtctcccagcccttcctgatggacctcgaggggaagcagggcaactttaagaacctgagggagttcgtgttcaagaacatcgacgggtacttcaagatctactcgaagcacacccccatcaatctgggacgcgacctccctcagggcttcagcgccctggagcccctcgtggacctgcccattggaatcaacatcaccaggttccagacgctcctggccctgcacaggagctacctgacacctggtgacagctccagtgggtggactgcaggtgccgccgcctactacgtggggtacctgcagcccaggacgttcctgctgaagtacaacgagaatgggaccattacagacgctgtggactgcgcactggaccccttaagcgagaccaagtgtactctgaagtccttcaccgtcgagaagggcatctatcagaccagcaatttcagagtccagccaactgagagcatcgtgaggttccccaacatcacaaacctgtgtccctttgacgaggtgttcaacgccacccggttcgcctccgtgtacgcctggaatcgcaagagaatcagcaactgtgtcgcagattattcagtgctgtacaacttcgccccattcttcgccttcaagtgctatggggtgagccccacaaagctgaatgatctgtgcttcacaaacgtgtatgctgattcttttgtgattcgaggcaacgaggtgagccagattgccccagggcagaccgggaacatcgcggactataattataagctccccgacgactttaccggctgcgtgattgcctggaacagcaataagctcgacagcaaggtcggggggaattataattataggtaccgcctgttccgaaagtccaacctgaagcccttcgagcgggatatctccacggagatctaccaggctggcaacaagccctgcaacggcgtggcaggggtgaactgctacttccccctgcagagctacgggttcaggcccacctacggggtggggcaccagccctaccgcgtggtggtcctgagcttcgagctcctgcacgcccccgcaacagtgtgcggtccaaagaagtccaccaacctggtgaagaataagtgcgtgaacttcaacttcaacggactcaccgggaccggcgtcctgaccgagtccaacaagaagttcctgcccttccagcagttcggcagagacatcgccgacactacggacgcggtccgggatccccagaccctggagatcctggacatcacgccctgtagtttcggcggtgtctctgtcattactcccgggaccaatacatccaaccaggtggcggtgctgtaccagggcgtgaattgcacggaggtgcccgtggcaattcacgccgaccagctgacccccacctggcgggtgtacagcaccgggagtaacgtgtttcagacacgggcaggatgtctgattggcgctgagtatgtgaacagcagctacgagtgcgacattcccatcggcgcggggatctgcgctagctatcagacccagaccaagagccacaggagggctcgctctgtggcctcacagagcatcatcgcctacacgatgagtctgggcgctgaaaacagcgtggcctactccaacaacagcatcgccatccctaccaacttcaccatctcagtgaccacagagatcctgcccgtgtccatgacaaagacttccgtggactgcaccatgtacatctgcggggacagcaccgagtgttccaacctcctgctccagtacggcagtttctgtacacagctcaagcgggccctgacaggaattgccgtggagcaggacaagaacactcaggaggtgtttgcccaggtcaagcagatctacaagacaccccccatcaagtacttcggggggttcaacttctcccagatcctgcccgaccccagcaagccctccaagaggagctttattgaagacctgctctttaataaggtgactctcgccgacgcagggttcatcaagcagtacggggactgcctgggggatatcgccgctcgagatctcatctgtgcccagaagttcaacgggctgaccgtcctgccccccctgctcacagatgagatgatcgcccagtacaccagcgccctgctggctgggaccatcacttcaggttggacgttcggagctggcgccgccctgcagatcccattcgccatgcagatggcctacaggttcaacgggatcggggtgactcagaatgtcctgtacgagaaccagaagctgattgccaaccagtttaactcagccatcgggaagattcaggacagcctgagcagcaccgcatccgccctggggaagctccaggatgtggtgaaccacaacgctcaggccctgaacaccctggtgaagcagctgagctccaagttcggggcaatcagctcggtcctcaacgacattctgagtcgcctcgatccccccgaggctgaggtccagatcgaccggctgatcactggtcggctgcagagtctgcagacctacgtgactcagcagctgatcagggcagccgagatccgggcctcagccaacctggcagccaccaagatgtccgagtgtgtcctggggcagtctaagcgggtggacttctgtgggaagggctaccacctgatgtccttcccacagagcgcaccccacggggtggtgttcctccacgtgacctacgtgcccgcacaggagaagaacttcaccaccgccccggccatctgccacgatggcaaggcccacttcccccgggaaggggtcttcgtgtcaaacgggacacactggtttgtgacccagcggaacttctacgagcctcagatcatcaccactgacaacaccttcgtcagtgggaactgcgacgtggtcatcggtattgtgaacaataccgtgtacgacccactgcagcccgagctcgactccttcaaggaggagctcgacaagtacttcaaaaaccatacttccccagacgtggacctgggcgacatcagcggcatcaacgccagcgtcgtcaatatccagaaggagatcgacaggctcaatgaggtggccaagaacctcaatgagagcctgatcgatctccaggaactggggaagtatgagcagtacatcaagtggccttggtacatctggctgggcttcatcgctggtctgattgccatcgtgatggtgaccattatgctgtgctgcatgaccagctgctgcagctgcctgaagggctgctgcagctgcgggtcatgctgcaagttcgatgaggacgacagcgagcctgtcctgaagggggtcaagctgcactacacctgataatctagagccgccgctccagctttgcacgtttcgatcccaaaggccctttttagggccgaccattcattgcaaaaaaaaaaaaaaaaaaaaaaaaaaaaaagcatatgactaaaaaaaaaaaaaaaaaaaaaaaaaaaaaaaaaaaaaa

SEQ ID NO: 186 - RNA, 3894 nt, synthetic construct
  source 1..3894: mol_type = other RNA
agaagctgtctatcgggctccagcggtcatgtttgtgttcctggtgctgctgccgctggtcagctcacagtgcgtgaacctgatcacgcgcacccagagctacaccaatagcttcacccggggggtgtactaccccgacaaggtgtttcgcagcagcgtgctgcactccacccaggacctgttcctgccgttcttctccaacgtgacctggttccacgccatcagcgggaccaacgggaccaagcggttcgacaaccccgtgctcccgtttaatgatggcgtgtacttcgccagcacggagaagagtaacatcatccggggatggatcttcggcaccacactggactcaaagacccagtcactgctgatcgtgaacaacgccacgaacgtggtgatcaaggtctgtgagttccagttctgcaacgatccgttcctggacgtgtactatcacaagaacaacaagtcctggatggagtccgagttccgggtgtactccagcgccaacaactgtacgttcgagtacgtgtcccagcccttcctgatggacctcgaggggaagcagggcaactttaaaaacctgcgggagttcgtgttcaagaacatcgacgggtactttaagatctacagcaaacacaccccgatcaacctggggcgcgacctcccgcaggggtttagcgccctggagcccctcgtggacttgcccatcgggatcaacatcacccggttccagacgctcctggccctgcacaggagctacctgacgccgggcgactccagctccggctggaccgccggggctgcagcctactacgtgggctacctgcagccccggacgttcttgttgaaatacaacgagaacggcacaatcacggacgccgtggactgtgccctcgacccgcttagcgagaccaagtgcacactcaaaagcttcaccgtggagaaggggatctatcagacctcaaacttccgggtccagccgactgagagcatcgtgcggttccccaacattaccaacttgtgccccttcgatgaggttttcaacgccacgcggtttgccagtgtgtatgcctggaacaggaagcgcatcagcaactgcgtggcagactactcagtgctgtacaacttcgccccgttcttcgccttcaagtgctacggggtgagccccaccaagctgaacgacctctgcttcaccaacgtgtacgccgacagcttcgtgattcgcggcaacgaggtgtcccagatcgcccccgggcagaccgggaacatcgccgactacaactacaagctgccggacgacttcaccgggtgcgtgatcgcctggaacagcaataagctggactccaaggtgggcgggaactacaactaccgctaccggttgttccggaagagtaacctgaagccgttcgagcgcgacatcagcaccgagatctaccaggccggcaacaagccctgcaacggggtggcaggggtgaactgttactttccgctgcagagctacgggttcaggcccacctacggggtggggcaccagccctaccgcgtggtggtcctgagcttcgagctgctgcacgcccccgccaccgtctgtgggcccaagaagtccacgaacttggtgaagaacaagtgcgtgaacttcaactttaacgggctcacaggcacgggggtgttgacggagagtaacaagaagttcctgccattccagcagttcggcagggacatcgccgacaccacggacgccgtccgggatccccagaccctggagatcctggacatcaccccgtgcagcttcggcggcgtctctgtcatcacccccggcaccaacacgtccaaccaggtggccgtcctgtaccagggggtgaactgtactgaggtgccggtggcgatacacgcagaccagttgacccccacctggcgcgtgtacagcacgggcagcaacgtcttccagacacgcgccggctgcttgatcggcgccgagtacgtgaactcaagctacgagtgcgatatccccatcggcgcagggatctgcgcctcctaccagacccaaaccaagtcccacaggagggccagatccgtggccagccagagcatcatcgcctacacgatgagcctcggcgccgagaattccgtggcttacagcaacaactccatcgccatccccaccaacttcacaatcagcgtgaccacggagatcttgcccgtcagcatgaccaagacctccgtggattgcaccatgtatatctgtggggacagcaccgagtgttccaacctgctcctgcagtacgggtccttctgcacccagctgaagcgggccttgaccggcatcgcagtggagcaggacaagaacactcaggaggtgtttgcccaggtcaagcagatctacaagacccccccgatcaagtacttcggggggttcaacttcagccagatcctgcccgaccccagcaaaccctccaagcggagcttcatcgaagacctgctctttaacaaagtgacgctggccgacgccggcttcatcaagcagtacggcgactgtctgggagacatcgctgcccgggacctgatatgcgcccagaagttcaacgggctgacggtgttgccacccctgctcaccgacgagatgatcgcccagtacacctccgccctcctggccgggacgatcacctctggctggacgttcggcgccggggccgcattacagatccccttcgccatgcagatggcctatagatttaacgggattggcgtcacgcagaacgtgctgtacgagaaccagaagctgatcgctaaccagttcaatagcgccatcgggaagatccaggacagcttgagcagcacggcgagcgctctgggcaagctccaggacgtcgtgaatcacaatgctcaggccctgaacacgttggtgaagcagctctcatcaaagttcggcgccatcagcagtgtgctgaacgatatcctcagtcggctggaccccccggaggccgaggtccagatagatcgcctgatcacggggcggctgcagagcttgcagacgtacgtgactcagcagctcatccgggctgctgagatccgggcgtctgccaacttggcagccaccaagatgagcgagtgtgtgctgggccagagcaagcgggtcgacttctgcgggaagggctaccacctgatgtccttcccgcagagcgcccctcacggggtggtcttcctgcacgtgacatatgtgccggcccaggagaagaacttcaccacggccccggccatatgtcacgacgggaaggcccacttcccccgcgagggggtgtttgtgagtaacggaacccactggttcgtgactcagagaaacttctacgaaccacagataatcaccactgacaacaccttcgtcagtgggaattgcgacgtggtgatcgggatcgtgaacaacaccgtgtacgatcccctccagccggagctggactccttcaaggaggagctggacaagtacttcaagaaccacactagccccgacgtggatctcggagacatctccgggatcaacgctagcgtggtgaatatccagaaggagatcgacaggctcaacgaggtggccaagaacctcaacgagagcctgatcgatctccaggagctgggcaagtacgaacagtacatcaagtggccctggtacatctggctcggcttcatcgcaggactgatcgccattgtgatggtcaccatcatgctgtgctgcatgaccagctgctgcagctgcctgaagggctgctgcagctgcgggtcatgctgcaagttcgacgaggacgacagcgagccggtcctgaagggagtgaagctgcactacacttgataagccgccgctccagctttgcacgtttcgatcccaaaggccctttttagggccgacca

SEQ ID NO: 187 - RNA, 3900 nt, synthetic construct
  source 1..3900: mol_type = other RNA
agaagctgtctatcgggctccagcggtcatgtttgtgttcctggtgctgctgccgctggtcagctcacagtgcgtgaacctgatcacgcgcacccagagctacaccaatagcttcacccggggggtgtactaccccgacaaggtgtttcgcagcagcgtgctgcactccacccaggacctgttcctgccgttcttctccaacgtgacctggttccacgccatcagcgggaccaacgggaccaagcggttcgacaaccccgtgctcccgtttaatgatggcgtgtacttcgccagcacggagaagagtaacatcatccggggatggatcttcggcaccacactggactcaaagacccagtcactgctgatcgtgaacaacgccacgaacgtggtgatcaaggtctgtgagttccagttctgcaacgatccgttcctggacgtgtactatcacaagaacaacaagtcctggatggagtccgagttccgggtgtactccagcgccaacaactgtacgttcgagtacgtgtcccagcccttcctgatggacctcgaggggaagcagggcaactttaaaaacctgcgggagttcgtgttcaagaacatcgacgggtactttaagatctacagcaaacacaccccgatcaacctggggcgcgacctcccgcaggggtttagcgccctggagcccctcgtggacttgcccatcgggatcaacatcacccggttccagacgctcctggccctgcacaggagctacctgacgccgggcgactccagctccggctggaccgccggggctgcagcctactacgtgggctacctgcagccccggacgttcttgttgaaatacaacgagaacggcacaatcacggacgccgtggactgtgccctcgacccgcttagcgagaccaagtgcacactcaaaagcttcaccgtggagaaggggatctatcagacctcaaacttccgggtccagccgactgagagcatcgtgcggttccccaacattaccaacttgtgccccttcgatgaggttttcaacgccacgcggtttgccagtgtgtatgcctggaacaggaagcgcatcagcaactgcgtggcagactactcagtgctgtacaacttcgccccgttcttcgccttcaagtgctacggggtgagccccaccaagctgaacgacctctgcttcaccaacgtgtacgccgacagcttcgtgattcgcggcaacgaggtgtcccagatcgcccccgggcagaccgggaacatcgccgactacaactacaagctgccggacgacttcaccgggtgcgtgatcgcctggaacagcaataagctggactccaaggtgggcgggaactacaactaccgctaccggttgttccggaagagtaacctgaagccgttcgagcgcgacatcagcaccgagatctaccaggccggcaacaagccctgcaacggggtggcaggggtgaactgttactttccgctgcagagctacgggttcaggcccacctacggggtggggcaccagccctaccgcgtggtggtcctgagcttcgagctgctgcacgcccccgccaccgtctgtgggcccaagaagtccacgaacttggtgaagaacaagtgcgtgaacttcaactttaacgggctcacaggcacgggggtgttgacggagagtaacaagaagttcctgccattccagcagttcggcagggacatcgccgacaccacggacgccgtccgggatccccagaccctggagatcctggacatcaccccgtgcagcttcggcggcgtctctgtcatcacccccggcaccaacacgtccaaccaggtggccgtcctgtaccagggggtgaactgtactgaggtgccggtggcgatacacgcagaccagttgacccccacctggcgcgtgtacagcacgggcagcaacgtcttccagacacgcgccggctgcttgatcggcgccgagtacgtgaactcaagctacgagtgcgatatccccatcggcgcagggatctgcgcctcctaccagacccaaaccaagtcccacaggagggccagatccgtggccagccagagcatcatcgcctacacgatgagcctcggcgccgagaattccgtggcttacagcaacaactccatcgccatccccaccaacttcacaatcagcgtgaccacggagatcttgcccgtcagcatgaccaagacctccgtggattgcaccatgtatatctgtggggacagcaccgagtgttccaacctgctcctgcagtacgggtccttctgcacccagctgaagcgggccttgaccggcatcgcagtggagcaggacaagaacactcaggaggtgtttgcccaggtcaagcagatctacaagacccccccgatcaagtacttcggggggttcaacttcagccagatcctgcccgaccccagcaaaccctccaagcggagcttcatcgaagacctgctctttaacaaagtgacgctggccgacgccggcttcatcaagcagtacggcgactgtctgggagacatcgctgcccgggacctgatatgcgcccagaagttcaacgggctgacggtgttgccacccctgctcaccgacgagatgatcgcccagtacacctccgccctcctggccgggacgatcacctctggctggacgttcggcgccggggccgcattacagatccccttcgccatgcagatggcctatagatttaacgggattggcgtcacgcagaacgtgctgtacgagaaccagaagctgatcgctaaccagttcaatagcgccatcgggaagatccaggacagcttgagcagcacggcgagcgctctgggcaagctccaggacgtcgtgaatcacaatgctcaggccctgaacacgttggtgaagcagctctcatcaaagttcggcgccatcagcagtgtgctgaacgatatcctcagtcggctggaccccccggaggccgaggtccagatagatcgcctgatcacggggcggctgcagagcttgcagacgtacgtgactcagcagctcatccgggctgctgagatccgggcgtctgccaacttggcagccaccaagatgagcgagtgtgtgctgggccagagcaagcgggtcgacttctgcgggaagggctaccacctgatgtccttcccgcagagcgcccctcacggggtggtcttcctgcacgtgacatatgtgccggcccaggagaagaacttcaccacggccccggccatatgtcacgacgggaaggcccacttcccccgcgagggggtgtttgtgagtaacggaacccactggttcgtgactcagagaaacttctacgaaccacagataatcaccactgacaacaccttcgtcagtgggaattgcgacgtggtgatcgggatcgtgaacaacaccgtgtacgatcccctccagccggagctggactccttcaaggaggagctggacaagtacttcaagaaccacactagccccgacgtggatctcggagacatctccgggatcaacgctagcgtggtgaatatccagaaggagatcgacaggctcaacgaggtggccaagaacctcaacgagagcctgatcgatctccaggagctgggcaagtacgaacagtacatcaagtggccctggtacatctggctcggcttcatcgcaggactgatcgccattgtgatggtcaccatcatgctgtgctgcatgaccagctgctgcagctgcctgaagggctgctgcagctgcgggtcatgctgcaagttcgacgaggacgacagcgagccggtcctgaagggagtgaagctgcactacacttgataatctagagccgccgctccagctttgcacgtttcgatcccaaaggccctttttagggccgacca

SEQ ID NO: 188 - RNA, 3903 nt, synthetic construct
  source 1..3903: mol_type = other RNA
aggagaagctgtctatcgggctccagcggtcatgtttgtgttcctggtgctgctgccgctggtcagctcacagtgcgtgaacctgatcacgcgcacccagagctacaccaatagcttcacccggggggtgtactaccccgacaaggtgtttcgcagcagcgtgctgcactccacccaggacctgttcctgccgttcttctccaacgtgacctggttccacgccatcagcgggaccaacgggaccaagcggttcgacaaccccgtgctcccgtttaatgatggcgtgtacttcgccagcacggagaagagtaacatcatccggggatggatcttcggcaccacactggactcaaagacccagtcactgctgatcgtgaacaacgccacgaacgtggtgatcaaggtctgtgagttccagttctgcaacgatccgttcctggacgtgtactatcacaagaacaacaagtcctggatggagtccgagttccgggtgtactccagcgccaacaactgtacgttcgagtacgtgtcccagcccttcctgatggacctcgaggggaagcagggcaactttaaaaacctgcgggagttcgtgttcaagaacatcgacgggtactttaagatctacagcaaacacaccccgatcaacctggggcgcgacctcccgcaggggtttagcgccctggagcccctcgtggacttgcccatcgggatcaacatcacccggttccagacgctcctggccctgcacaggagctacctgacgccgggcgactccagctccggctggaccgccggggctgcagcctactacgtgggctacctgcagccccggacgttcttgttgaaatacaacgagaacggcacaatcacggacgccgtggactgtgccctcgacccgcttagcgagaccaagtgcacactcaaaagcttcaccgtggagaaggggatctatcagacctcaaacttccgggtccagccgactgagagcatcgtgcggttccccaacattaccaacttgtgccccttcgatgaggttttcaacgccacgcggtttgccagtgtgtatgcctggaacaggaagcgcatcagcaactgcgtggcagactactcagtgctgtacaacttcgccccgttcttcgccttcaagtgctacggggtgagccccaccaagctgaacgacctctgcttcaccaacgtgtacgccgacagcttcgtgattcgcggcaacgaggtgtcccagatcgcccccgggcagaccgggaacatcgccgactacaactacaagctgccggacgacttcaccgggtgcgtgatcgcctggaacagcaataagctggactccaaggtgggcgggaactacaactaccgctaccggttgttccggaagagtaacctgaagccgttcgagcgcgacatcagcaccgagatctaccaggccggcaacaagccctgcaacggggtggcaggggtgaactgttactttccgctgcagagctacgggttcaggcccacctacggggtggggcaccagccctaccgcgtggtggtcctgagcttcgagctgctgcacgcccccgccaccgtctgtgggcccaagaagtccacgaacttggtgaagaacaagtgcgtgaacttcaactttaacgggctcacaggcacgggggtgttgacggagagtaacaagaagttcctgccattccagcagttcggcagggacatcgccgacaccacggacgccgtccgggatccccagaccctggagatcctggacatcaccccgtgcagcttcggcggcgtctctgtcatcacccccggcaccaacacgtccaaccaggtggccgtcctgtaccagggggtgaactgtactgaggtgccggtggcgatacacgcagaccagttgacccccacctggcgcgtgtacagcacgggcagcaacgtcttccagacacgcgccggctgcttgatcggcgccgagtacgtgaactcaagctacgagtgcgatatccccatcggcgcagggatctgcgcctcctaccagacccaaaccaagtcccacaggagggccagatccgtggccagccagagcatcatcgcctacacgatgagcctcggcgccgagaattccgtggcttacagcaacaactccatcgccatccccaccaacttcacaatcagcgtgaccacggagatcttgcccgtcagcatgaccaagacctccgtggattgcaccatgtatatctgtggggacagcaccgagtgttccaacctgctcctgcagtacgggtccttctgcacccagctgaagcgggccttgaccggcatcgcagtggagcaggacaagaacactcaggaggtgtttgcccaggtcaagcagatctacaagacccccccgatcaagtacttcggggggttcaacttcagccagatcctgcccgaccccagcaaaccctccaagcggagcttcatcgaagacctgctctttaacaaagtgacgctggccgacgccggcttcatcaagcagtacggcgactgtctgggagacatcgctgcccgggacctgatatgcgcccagaagttcaacgggctgacggtgttgccacccctgctcaccgacgagatgatcgcccagtacacctccgccctcctggccgggacgatcacctctggctggacgttcggcgccggggccgcattacagatccccttcgccatgcagatggcctatagatttaacgggattggcgtcacgcagaacgtgctgtacgagaaccagaagctgatcgctaaccagttcaatagcgccatcgggaagatccaggacagcttgagcagcacggcgagcgctctgggcaagctccaggacgtcgtgaatcacaatgctcaggccctgaacacgttggtgaagcagctctcatcaaagttcggcgccatcagcagtgtgctgaacgatatcctcagtcggctggaccccccggaggccgaggtccagatagatcgcctgatcacggggcggctgcagagcttgcagacgtacgtgactcagcagctcatccgggctgctgagatccgggcgtctgccaacttggcagccaccaagatgagcgagtgtgtgctgggccagagcaagcgggtcgacttctgcgggaagggctaccacctgatgtccttcccgcagagcgcccctcacggggtggtcttcctgcacgtgacatatgtgccggcccaggagaagaacttcaccacggccccggccatatgtcacgacgggaaggcccacttcccccgcgagggggtgtttgtgagtaacggaacccactggttcgtgactcagagaaacttctacgaaccacagataatcaccactgacaacaccttcgtcagtgggaattgcgacgtggtgatcgggatcgtgaacaacaccgtgtacgatcccctccagccggagctggactccttcaaggaggagctggacaagtacttcaagaaccacactagccccgacgtggatctcggagacatctccgggatcaacgctagcgtggtgaatatccagaaggagatcgacaggctcaacgaggtggccaagaacctcaacgagagcctgatcgatctccaggagctgggcaagtacgaacagtacatcaagtggccctggtacatctggctcggcttcatcgcaggactgatcgccattgtgatggtcaccatcatgctgtgctgcatgaccagctgctgcagctgcctgaagggctgctgcagctgcgggtcatgctgcaagttcgacgaggacgacagcgagccggtcctgaagggagtgaagctgcactacacttgataatctagagccgccgctccagctttgcacgtttcgatcccaaaggccctttttagggccgacca

SEQ ID NO: 189 - RNA, 3989 nt, synthetic construct
  source 1..3989: mol_type = other RNA
aggagaagctgtctatcgggctccagcggtcatgtttgtgttcctggtgctgctgccgctggtcagctcacagtgcgtgaacctgatcacgcgcacccagagctacaccaatagcttcacccggggggtgtactaccccgacaaggtgtttcgcagcagcgtgctgcactccacccaggacctgttcctgccgttcttctccaacgtgacctggttccacgccatcagcgggaccaacgggaccaagcggttcgacaaccccgtgctcccgtttaatgatggcgtgtacttcgccagcacggagaagagtaacatcatccggggatggatcttcggcaccacactggactcaaagacccagtcactgctgatcgtgaacaacgccacgaacgtggtgatcaaggtctgtgagttccagttctgcaacgatccgttcctggacgtgtactatcacaagaacaacaagtcctggatggagtccgagttccgggtgtactccagcgccaacaactgtacgttcgagtacgtgtcccagcccttcctgatggacctcgaggggaagcagggcaactttaaaaacctgcgggagttcgtgttcaagaacatcgacgggtactttaagatctacagcaaacacaccccgatcaacctggggcgcgacctcccgcaggggtttagcgccctggagcccctcgtggacttgcccatcgggatcaacatcacccggttccagacgctcctggccctgcacaggagctacctgacgccgggcgactccagctccggctggaccgccggggctgcagcctactacgtgggctacctgcagccccggacgttcttgttgaaatacaacgagaacggcacaatcacggacgccgtggactgtgccctcgacccgcttagcgagaccaagtgcacactcaaaagcttcaccgtggagaaggggatctatcagacctcaaacttccgggtccagccgactgagagcatcgtgcggttccccaacattaccaacttgtgccccttcgatgaggttttcaacgccacgcggtttgccagtgtgtatgcctggaacaggaagcgcatcagcaactgcgtggcagactactcagtgctgtacaacttcgccccgttcttcgccttcaagtgctacggggtgagccccaccaagctgaacgacctctgcttcaccaacgtgtacgccgacagcttcgtgattcgcggcaacgaggtgtcccagatcgcccccgggcagaccgggaacatcgccgactacaactacaagctgccggacgacttcaccgggtgcgtgatcgcctggaacagcaataagctggactccaaggtgggcgggaactacaactaccgctaccggttgttccggaagagtaacctgaagccgttcgagcgcgacatcagcaccgagatctaccaggccggcaacaagccctgcaacggggtggcaggggtgaactgttactttccgctgcagagctacgggttcaggcccacctacggggtggggcaccagccctaccgcgtggtggtcctgagcttcgagctgctgcacgcccccgccaccgtctgtgggcccaagaagtccacgaacttggtgaagaacaagtgcgtgaacttcaactttaacgggctcacaggcacgggggtgttgacggagagtaacaagaagttcctgccattccagcagttcggcagggacatcgccgacaccacggacgccgtccgggatccccagaccctggagatcctggacatcaccccgtgcagcttcggcggcgtctctgtcatcacccccggcaccaacacgtccaaccaggtggccgtcctgtaccagggggtgaactgtactgaggtgccggtggcgatacacgcagaccagttgacccccacctggcgcgtgtacagcacgggcagcaacgtcttccagacacgcgccggctgcttgatcggcgccgagtacgtgaactcaagctacgagtgcgatatccccatcggcgcagggatctgcgcctcctaccagacccaaaccaagtcccacaggagggccagatccgtggccagccagagcatcatcgcctacacgatgagcctcggcgccgagaattccgtggcttacagcaacaactccatcgccatccccaccaacttcacaatcagcgtgaccacggagatcttgcccgtcagcatgaccaagacctccgtggattgcaccatgtatatctgtggggacagcaccgagtgttccaacctgctcctgcagtacgggtccttctgcacccagctgaagcgggccttgaccggcatcgcagtggagcaggacaagaacactcaggaggtgtttgcccaggtcaagcagatctacaagacccccccgatcaagtacttcggggggttcaacttcagccagatcctgcccgaccccagcaaaccctccaagcggagcttcatcgaagacctgctctttaacaaagtgacgctggccgacgccggcttcatcaagcagtacggcgactgtctgggagacatcgctgcccgggacctgatatgcgcccagaagttcaacgggctgacggtgttgccacccctgctcaccgacgagatgatcgcccagtacacctccgccctcctggccgggacgatcacctctggctggacgttcggcgccggggccgcattacagatccccttcgccatgcagatggcctatagatttaacgggattggcgtcacgcagaacgtgctgtacgagaaccagaagctgatcgctaaccagttcaatagcgccatcgggaagatccaggacagcttgagcagcacggcgagcgctctgggcaagctccaggacgtcgtgaatcacaatgctcaggccctgaacacgttggtgaagcagctctcatcaaagttcggcgccatcagcagtgtgctgaacgatatcctcagtcggctggaccccccggaggccgaggtccagatagatcgcctgatcacggggcggctgcagagcttgcagacgtacgtgactcagcagctcatccgggctgctgagatccgggcgtctgccaacttggcagccaccaagatgagcgagtgtgtgctgggccagagcaagcgggtcgacttctgcgggaagggctaccacctgatgtccttcccgcagagcgcccctcacggggtggtcttcctgcacgtgacatatgtgccggcccaggagaagaacttcaccacggccccggccatatgtcacgacgggaaggcccacttcccccgcgagggggtgtttgtgagtaacggaacccactggttcgtgactcagagaaacttctacgaaccacagataatcaccactgacaacaccttcgtcagtgggaattgcgacgtggtgatcgggatcgtgaacaacaccgtgtacgatcccctccagccggagctggactccttcaaggaggagctggacaagtacttcaagaaccacactagccccgacgtggatctcggagacatctccgggatcaacgctagcgtggtgaatatccagaaggagatcgacaggctcaacgaggtggccaagaacctcaacgagagcctgatcgatctccaggagctgggcaagtacgaacagtacatcaagtggccctggtacatctggctcggcttcatcgcaggactgatcgccattgtgatggtcaccatcatgctgtgctgcatgaccagctgctgcagctgcctgaagggctgctgcagctgcgggtcatgctgcaagttcgacgaggacgacagcgagccggtcctgaagggagtgaagctgcactacacttgataatctagagccgccgctccagctttgcacgtttcgatcccaaaggccctttttagggccgaccattcattgcaaaaaaaaaaaaaaaaaaaaaaaaaaaaaagcatatgactaaaaaaaaaaaaaaaaaaaaaaaaaaaaaaaaaaaaaa

SEQ ID NO: 190 - RNA, 3894 nt, synthetic construct
  source 1..3894: mol_type = other RNA
agaagctgtctatcgggctccagcggtcatgttcgtgttcctggtgctgctgccgctggtcagctcacagtgcgtgaacctgatcacgcgcacccagagctacacgaacagctttacccggggggtgtactaccccgacaaagtgttccgcagcagcgtgcttcactccactcaggacctgttcctgccgttcttctccaacgtgacctggtttcacgccatcagcgggaccaacgggaccaagcgcttcgacaaccccgtgctcccgttcaacgatggcgtgtacttcgccagcacggagaagagtaacatcatccgggggtggatcttcggcacgaccctggactccaagacccaatcactgctgatcgtgaacaacgccacgaacgtggtgatcaaggtctgcgagttccagttctgcaacgatccattcctggatgtgtactatcacaagaacaacaagtcctggatggagtccgagttccgggtgtactcaagcgccaacaactgtacgttcgagtacgtgtcccagcccttcctgatggacctcgaggggaagcagggcaacttcaagaacctgcgggagttcgtgttcaagaacatcgacgggtacttcaagatctactcgaagcacaccccgatcaatcttggacgcgatctcccgcagggctttagcgccctggagcccctcgtggacctgcccatcgggatcaacatcacccggttccagacgctcctggccctgcacaggagctacctgacgccgggtgactccagctccggctggaccgccggggctgcggcctactacgtgggctacttgcagccccggacgttcttgttgaagtacaacgagaacggcacaatcacggacgccgtggattgtgccctcgacccgctgagcgagaccaagtgcacactcaagagcttcaccgtggagaaggggatctatcagacctcaaatttccgggtccagccgacagagagtatcgttcggttcccgaacatcactaacttgtgcccctttgacgaggtgttcaacgccacgcggtttgcgagcgtgtacgcctggaacaggaagcgcatcagcaactgcgtggcggattactcagtgttgtacaacttcgccccgttcttcgccttcaagtgttacggggtgagccccacaaaactgaacgatctctgcttcaccaacgtgtatgccgacagctttgtgattcgcggcaacgaggtgtcccagatcgcccccgggcagaccgggaatatcgccgactacaactacaagctgccggacgacttcaccggttgcgtgattgcctggaacagcaataagctggactccaaggtgggcgggaattacaactaccgctaccggttgttcaggaagagtaacctgaagccgttcgagcgtgacatcagtaccgagatctaccaggccggcaacaagccctgcaacggggtggcgggggtgaactgttactttccgctgcagagctacgggttcaggcccacctacggggtggggcaccagccctaccgcgtggtggtcctgagcttcgagctgctgcacgcccccgccaccgtctgtgggcccaagaagtccacgaacttggtgaaaaacaagtgcgtgaacttcaacttcaacgggctcacgggcacgggggtgttgacggagagtaacaagaagttcctgccattccagcagttcggcagggacatcgccgacaccacggatgccgtccgggatccccagaccctggagatcctggacatcaccccgtgcagcttcggcggtgtctctgtcattacccccggcaccaacacgtccaaccaggtggccgtcctgtaccagggggtgaactgtactgaggtgccggtggcaatacacgcagaccagttgacccccacctggcgcgtgtacagcacgggcagcaacgtcttccagacacgcgccggctgcttgatcggcgccgagtacgtgaactcatcgtatgagtgtgatattccgattggcgcagggatctgtgcctcctaccagacccagaccaagtcccacaggagggccaggtccgtggccagtcagagtatcatcgcttatacgatgagcctcggcgccgagaacagcgtcgcctacagcaacaactccatcgctatccccacaaatttcaccatcagcgtgaccacggagatcttgcccgtcagcatgaccaagacctccgtggactgcacgatgtacatttgtggggatagcaccgagtgttccaacctgctcctgcagtacgggtcattctgcacgcagctgaagcgtgcattgaccggtattgccgtggagcaggacaagaacactcaggaggtgtttgctcaggtcaagcagatctacaagacgcccccgatcaagtacttcggcggcttcaacttcagccagatcctgcctgacccgagcaaaccctccaagcggagcttcatcgaggacctgctctttaacaaggtgacgctggccgacgccggcttcatcaagcagtacggcgactgtctgggagacatcgctgcccgtgacttgatatgcgcccagaagttcaacggtctgacggtgttgccaccgctgctcacagacgagatgatcgcccagtacacgtccgccctcctggccgggacgatcacatctggttggacgtttggtgccggggctgcattacagatccccttcgccatgcagatggcctacagattcaacggtattggtgtcacgcagaacgtgctttatgagaaccagaagctgattgccaaccagttcaatagcgcaatcgggaagatccaggacagcttgagcagtacggcgagcgccctggggaagctgcaggacgtcgtgaatcacaacgctcaggcactgaacacgttggtgaagcagctctcctcaaagttcggcgcgattagttcggtgctgaacgatattctcagtcggctggaccccccggaggccgaggtccagatagatcgcctcatcacggggcggctgcagagtttgcagacgtacgtgactcagcagctcatcagagctgctgagatccgtgcgtctgcaaacttggcagccaccaagatgagcgagtgtgtgcttggtcagagcaagcgggtcgatttctgcgggaagggctatcacctgatgtccttcccgcagagcgctccccacggcgtggtcttcctgcacgtgacgtatgtgccggcccaggagaagaacttcaccacggccccggccatatgtcacgacgggaaggcccacttcccccgtgagggggtgttcgtgagcaacggaacccactggttcgtgactcagagaaacttctacgagccacagataattaccactgacaacacttttgtcagtggtaattgcgacgtggtcatagggatcgtgaacaacaccgtttacgatcccctccagccggagctggactccttcaaggaggagctggataagtacttcaagaaccacactagccccgacgttgatctcggggacatctccgggatcaatgctagtgtggtgaatatacagaaggagatcgacaggctcaacgaggtggccaagaacctcaacgagagcctgatcgatctccaggagctgggcaagtacgagcagtacatcaagtggccttggtacatctggctcggcttcatcgcaggactgatcgccatcgtgatggtgaccatcatgctgtgctgcatgaccagctgctgcagctgcctgaagggctgctgcagctgcgggtcatgctgcaagttcgacgaggacgacagcgagccggtcctgaagggagtgaagctgcactacacctgataagccgccgctccagctttgcacgtttcgatcccaaaggccctttttagggccgacca

SEQ ID NO: 191 - RNA, 3900 nt, synthetic construct
  source 1..3900: mol_type = other RNA
agaagctgtctatcgggctccagcggtcatgttcgtgttcctggtgctgctgccgctggtcagctcacagtgcgtgaacctgatcacgcgcacccagagctacacgaacagctttacccggggggtgtactaccccgacaaagtgttccgcagcagcgtgcttcactccactcaggacctgttcctgccgttcttctccaacgtgacctggtttcacgccatcagcgggaccaacgggaccaagcgcttcgacaaccccgtgctcccgttcaacgatggcgtgtacttcgccagcacggagaagagtaacatcatccgggggtggatcttcggcacgaccctggactccaagacccaatcactgctgatcgtgaacaacgccacgaacgtggtgatcaaggtctgcgagttccagttctgcaacgatccattcctggatgtgtactatcacaagaacaacaagtcctggatggagtccgagttccgggtgtactcaagcgccaacaactgtacgttcgagtacgtgtcccagcccttcctgatggacctcgaggggaagcagggcaacttcaagaacctgcgggagttcgtgttcaagaacatcgacgggtacttcaagatctactcgaagcacaccccgatcaatcttggacgcgatctcccgcagggctttagcgccctggagcccctcgtggacctgcccatcgggatcaacatcacccggttccagacgctcctggccctgcacaggagctacctgacgccgggtgactccagctccggctggaccgccggggctgcggcctactacgtgggctacttgcagccccggacgttcttgttgaagtacaacgagaacggcacaatcacggacgccgtggattgtgccctcgacccgctgagcgagaccaagtgcacactcaagagcttcaccgtggagaaggggatctatcagacctcaaatttccgggtccagccgacagagagtatcgttcggttcccgaacatcactaacttgtgcccctttgacgaggtgttcaacgccacgcggtttgcgagcgtgtacgcctggaacaggaagcgcatcagcaactgcgtggcggattactcagtgttgtacaacttcgccccgttcttcgccttcaagtgttacggggtgagccccacaaaactgaacgatctctgcttcaccaacgtgtatgccgacagctttgtgattcgcggcaacgaggtgtcccagatcgcccccgggcagaccgggaatatcgccgactacaactacaagctgccggacgacttcaccggttgcgtgattgcctggaacagcaataagctggactccaaggtgggcgggaattacaactaccgctaccggttgttcaggaagagtaacctgaagccgttcgagcgtgacatcagtaccgagatctaccaggccggcaacaagccctgcaacggggtggcgggggtgaactgttactttccgctgcagagctacgggttcaggcccacctacggggtggggcaccagccctaccgcgtggtggtcctgagcttcgagctgctgcacgcccccgccaccgtctgtgggcccaagaagtccacgaacttggtgaaaaacaagtgcgtgaacttcaacttcaacgggctcacgggcacgggggtgttgacggagagtaacaagaagttcctgccattccagcagttcggcagggacatcgccgacaccacggatgccgtccgggatccccagaccctggagatcctggacatcaccccgtgcagcttcggcggtgtctctgtcattacccccggcaccaacacgtccaaccaggtggccgtcctgtaccagggggtgaactgtactgaggtgccggtggcaatacacgcagaccagttgacccccacctggcgcgtgtacagcacgggcagcaacgtcttccagacacgcgccggctgcttgatcggcgccgagtacgtgaactcatcgtatgagtgtgatattccgattggcgcagggatctgtgcctcctaccagacccagaccaagtcccacaggagggccaggtccgtggccagtcagagtatcatcgcttatacgatgagcctcggcgccgagaacagcgtcgcctacagcaacaactccatcgctatccccacaaatttcaccatcagcgtgaccacggagatcttgcccgtcagcatgaccaagacctccgtggactgcacgatgtacatttgtggggatagcaccgagtgttccaacctgctcctgcagtacgggtcattctgcacgcagctgaagcgtgcattgaccggtattgccgtggagcaggacaagaacactcaggaggtgtttgctcaggtcaagcagatctacaagacgcccccgatcaagtacttcggcggcttcaacttcagccagatcctgcctgacccgagcaaaccctccaagcggagcttcatcgaggacctgctctttaacaaggtgacgctggccgacgccggcttcatcaagcagtacggcgactgtctgggagacatcgctgcccgtgacttgatatgcgcccagaagttcaacggtctgacggtgttgccaccgctgctcacagacgagatgatcgcccagtacacgtccgccctcctggccgggacgatcacatctggttggacgtttggtgccggggctgcattacagatccccttcgccatgcagatggcctacagattcaacggtattggtgtcacgcagaacgtgctttatgagaaccagaagctgattgccaaccagttcaatagcgcaatcgggaagatccaggacagcttgagcagtacggcgagcgccctggggaagctgcaggacgtcgtgaatcacaacgctcaggcactgaacacgttggtgaagcagctctcctcaaagttcggcgcgattagttcggtgctgaacgatattctcagtcggctggaccccccggaggccgaggtccagatagatcgcctcatcacggggcggctgcagagtttgcagacgtacgtgactcagcagctcatcagagctgctgagatccgtgcgtctgcaaacttggcagccaccaagatgagcgagtgtgtgcttggtcagagcaagcgggtcgatttctgcgggaagggctatcacctgatgtccttcccgcagagcgctccccacggcgtggtcttcctgcacgtgacgtatgtgccggcccaggagaagaacttcaccacggccccggccatatgtcacgacgggaaggcccacttcccccgtgagggggtgttcgtgagcaacggaacccactggttcgtgactcagagaaacttctacgagccacagataattaccactgacaacacttttgtcagtggtaattgcgacgtggtcatagggatcgtgaacaacaccgtttacgatcccctccagccggagctggactccttcaaggaggagctggataagtacttcaagaaccacactagccccgacgttgatctcggggacatctccgggatcaatgctagtgtggtgaatatacagaaggagatcgacaggctcaacgaggtggccaagaacctcaacgagagcctgatcgatctccaggagctgggcaagtacgagcagtacatcaagtggccttggtacatctggctcggcttcatcgcaggactgatcgccatcgtgatggtgaccatcatgctgtgctgcatgaccagctgctgcagctgcctgaagggctgctgcagctgcgggtcatgctgcaagttcgacgaggacgacagcgagccggtcctgaagggagtgaagctgcactacacctgataatctagagccgccgctccagctttgcacgtttcgatcccaaaggccctttttagggccgacca

SEQ ID NO: 192 - RNA, 3903 nt, synthetic construct
  source 1..3903: mol_type = other RNA
aggagaagctgtctatcgggctccagcggtcatgttcgtgttcctggtgctgctgccgctggtcagctcacagtgcgtgaacctgatcacgcgcacccagagctacacgaacagctttacccggggggtgtactaccccgacaaagtgttccgcagcagcgtgcttcactccactcaggacctgttcctgccgttcttctccaacgtgacctggtttcacgccatcagcgggaccaacgggaccaagcgcttcgacaaccccgtgctcccgttcaacgatggcgtgtacttcgccagcacggagaagagtaacatcatccgggggtggatcttcggcacgaccctggactccaagacccaatcactgctgatcgtgaacaacgccacgaacgtggtgatcaaggtctgcgagttccagttctgcaacgatccattcctggatgtgtactatcacaagaacaacaagtcctggatggagtccgagttccgggtgtactcaagcgccaacaactgtacgttcgagtacgtgtcccagcccttcctgatggacctcgaggggaagcagggcaacttcaagaacctgcgggagttcgtgttcaagaacatcgacgggtacttcaagatctactcgaagcacaccccgatcaatcttggacgcgatctcccgcagggctttagcgccctggagcccctcgtggacctgcccatcgggatcaacatcacccggttccagacgctcctggccctgcacaggagctacctgacgccgggtgactccagctccggctggaccgccggggctgcggcctactacgtgggctacttgcagccccggacgttcttgttgaagtacaacgagaacggcacaatcacggacgccgtggattgtgccctcgacccgctgagcgagaccaagtgcacactcaagagcttcaccgtggagaaggggatctatcagacctcaaatttccgggtccagccgacagagagtatcgttcggttcccgaacatcactaacttgtgcccctttgacgaggtgttcaacgccacgcggtttgcgagcgtgtacgcctggaacaggaagcgcatcagcaactgcgtggcggattactcagtgttgtacaacttcgccccgttcttcgccttcaagtgttacggggtgagccccacaaaactgaacgatctctgcttcaccaacgtgtatgccgacagctttgtgattcgcggcaacgaggtgtcccagatcgcccccgggcagaccgggaatatcgccgactacaactacaagctgccggacgacttcaccggttgcgtgattgcctggaacagcaataagctggactccaaggtgggcgggaattacaactaccgctaccggttgttcaggaagagtaacctgaagccgttcgagcgtgacatcagtaccgagatctaccaggccggcaacaagccctgcaacggggtggcgggggtgaactgttactttccgctgcagagctacgggttcaggcccacctacggggtggggcaccagccctaccgcgtggtggtcctgagcttcgagctgctgcacgcccccgccaccgtctgtgggcccaagaagtccacgaacttggtgaaaaacaagtgcgtgaacttcaacttcaacgggctcacgggcacgggggtgttgacggagagtaacaagaagttcctgccattccagcagttcggcagggacatcgccgacaccacggatgccgtccgggatccccagaccctggagatcctggacatcaccccgtgcagcttcggcggtgtctctgtcattacccccggcaccaacacgtccaaccaggtggccgtcctgtaccagggggtgaactgtactgaggtgccggtggcaatacacgcagaccagttgacccccacctggcgcgtgtacagcacgggcagcaacgtcttccagacacgcgccggctgcttgatcggcgccgagtacgtgaactcatcgtatgagtgtgatattccgattggcgcagggatctgtgcctcctaccagacccagaccaagtcccacaggagggccaggtccgtggccagtcagagtatcatcgcttatacgatgagcctcggcgccgagaacagcgtcgcctacagcaacaactccatcgctatccccacaaatttcaccatcagcgtgaccacggagatcttgcccgtcagcatgaccaagacctccgtggactgcacgatgtacatttgtggggatagcaccgagtgttccaacctgctcctgcagtacgggtcattctgcacgcagctgaagcgtgcattgaccggtattgccgtggagcaggacaagaacactcaggaggtgtttgctcaggtcaagcagatctacaagacgcccccgatcaagtacttcggcggcttcaacttcagccagatcctgcctgacccgagcaaaccctccaagcggagcttcatcgaggacctgctctttaacaaggtgacgctggccgacgccggcttcatcaagcagtacggcgactgtctgggagacatcgctgcccgtgacttgatatgcgcccagaagttcaacggtctgacggtgttgccaccgctgctcacagacgagatgatcgcccagtacacgtccgccctcctggccgggacgatcacatctggttggacgtttggtgccggggctgcattacagatccccttcgccatgcagatggcctacagattcaacggtattggtgtcacgcagaacgtgctttatgagaaccagaagctgattgccaaccagttcaatagcgcaatcgggaagatccaggacagcttgagcagtacggcgagcgccctggggaagctgcaggacgtcgtgaatcacaacgctcaggcactgaacacgttggtgaagcagctctcctcaaagttcggcgcgattagttcggtgctgaacgatattctcagtcggctggaccccccggaggccgaggtccagatagatcgcctcatcacggggcggctgcagagtttgcagacgtacgtgactcagcagctcatcagagctgctgagatccgtgcgtctgcaaacttggcagccaccaagatgagcgagtgtgtgcttggtcagagcaagcgggtcgatttctgcgggaagggctatcacctgatgtccttcccgcagagcgctccccacggcgtggtcttcctgcacgtgacgtatgtgccggcccaggagaagaacttcaccacggccccggccatatgtcacgacgggaaggcccacttcccccgtgagggggtgttcgtgagcaacggaacccactggttcgtgactcagagaaacttctacgagccacagataattaccactgacaacacttttgtcagtggtaattgcgacgtggtcatagggatcgtgaacaacaccgtttacgatcccctccagccggagctggactccttcaaggaggagctggataagtacttcaagaaccacactagccccgacgttgatctcggggacatctccgggatcaatgctagtgtggtgaatatacagaaggagatcgacaggctcaacgaggtggccaagaacctcaacgagagcctgatcgatctccaggagctgggcaagtacgagcagtacatcaagtggccttggtacatctggctcggcttcatcgcaggactgatcgccatcgtgatggtgaccatcatgctgtgctgcatgaccagctgctgcagctgcctgaagggctgctgcagctgcgggtcatgctgcaagttcgacgaggacgacagcgagccggtcctgaagggagtgaagctgcactacacctgataatctagagccgccgctccagctttgcacgtttcgatcccaaaggccctttttagggccgacca

SEQ ID NO: 193 - RNA, 3989 nt, synthetic construct
  source 1..3989: mol_type = other RNA
aggagaagctgtctatcgggctccagcggtcatgttcgtgttcctggtgctgctgccgctggtcagctcacagtgcgtgaacctgatcacgcgcacccagagctacacgaacagctttacccggggggtgtactaccccgacaaagtgttccgcagcagcgtgcttcactccactcaggacctgttcctgccgttcttctccaacgtgacctggtttcacgccatcagcgggaccaacgggaccaagcgcttcgacaaccccgtgctcccgttcaacgatggcgtgtacttcgccagcacggagaagagtaacatcatccgggggtggatcttcggcacgaccctggactccaagacccaatcactgctgatcgtgaacaacgccacgaacgtggtgatcaaggtctgcgagttccagttctgcaacgatccattcctggatgtgtactatcacaagaacaacaagtcctggatggagtccgagttccgggtgtactcaagcgccaacaactgtacgttcgagtacgtgtcccagcccttcctgatggacctcgaggggaagcagggcaacttcaagaacctgcgggagttcgtgttcaagaacatcgacgggtacttcaagatctactcgaagcacaccccgatcaatcttggacgcgatctcccgcagggctttagcgccctggagcccctcgtggacctgcccatcgggatcaacatcacccggttccagacgctcctggccctgcacaggagctacctgacgccgggtgactccagctccggctggaccgccggggctgcggcctactacgtgggctacttgcagccccggacgttcttgttgaagtacaacgagaacggcacaatcacggacgccgtggattgtgccctcgacccgctgagcgagaccaagtgcacactcaagagcttcaccgtggagaaggggatctatcagacctcaaatttccgggtccagccgacagagagtatcgttcggttcccgaacatcactaacttgtgcccctttgacgaggtgttcaacgccacgcggtttgcgagcgtgtacgcctggaacaggaagcgcatcagcaactgcgtggcggattactcagtgttgtacaacttcgccccgttcttcgccttcaagtgttacggggtgagccccacaaaactgaacgatctctgcttcaccaacgtgtatgccgacagctttgtgattcgcggcaacgaggtgtcccagatcgcccccgggcagaccgggaatatcgccgactacaactacaagctgccggacgacttcaccggttgcgtgattgcctggaacagcaataagctggactccaaggtgggcgggaattacaactaccgctaccggttgttcaggaagagtaacctgaagccgttcgagcgtgacatcagtaccgagatctaccaggccggcaacaagccctgcaacggggtggcgggggtgaactgttactttccgctgcagagctacgggttcaggcccacctacggggtggggcaccagccctaccgcgtggtggtcctgagcttcgagctgctgcacgcccccgccaccgtctgtgggcccaagaagtccacgaacttggtgaaaaacaagtgcgtgaacttcaacttcaacgggctcacgggcacgggggtgttgacggagagtaacaagaagttcctgccattccagcagttcggcagggacatcgccgacaccacggatgccgtccgggatccccagaccctggagatcctggacatcaccccgtgcagcttcggcggtgtctctgtcattacccccggcaccaacacgtccaaccaggtggccgtcctgtaccagggggtgaactgtactgaggtgccggtggcaatacacgcagaccagttgacccccacctggcgcgtgtacagcacgggcagcaacgtcttccagacacgcgccggctgcttgatcggcgccgagtacgtgaactcatcgtatgagtgtgatattccgattggcgcagggatctgtgcctcctaccagacccagaccaagtcccacaggagggccaggtccgtggccagtcagagtatcatcgcttatacgatgagcctcggcgccgagaacagcgtcgcctacagcaacaactccatcgctatccccacaaatttcaccatcagcgtgaccacggagatcttgcccgtcagcatgaccaagacctccgtggactgcacgatgtacatttgtggggatagcaccgagtgttccaacctgctcctgcagtacgggtcattctgcacgcagctgaagcgtgcattgaccggtattgccgtggagcaggacaagaacactcaggaggtgtttgctcaggtcaagcagatctacaagacgcccccgatcaagtacttcggcggcttcaacttcagccagatcctgcctgacccgagcaaaccctccaagcggagcttcatcgaggacctgctctttaacaaggtgacgctggccgacgccggcttcatcaagcagtacggcgactgtctgggagacatcgctgcccgtgacttgatatgcgcccagaagttcaacggtctgacggtgttgccaccgctgctcacagacgagatgatcgcccagtacacgtccgccctcctggccgggacgatcacatctggttggacgtttggtgccggggctgcattacagatccccttcgccatgcagatggcctacagattcaacggtattggtgtcacgcagaacgtgctttatgagaaccagaagctgattgccaaccagttcaatagcgcaatcgggaagatccaggacagcttgagcagtacggcgagcgccctggggaagctgcaggacgtcgtgaatcacaacgctcaggcactgaacacgttggtgaagcagctctcctcaaagttcggcgcgattagttcggtgctgaacgatattctcagtcggctggaccccccggaggccgaggtccagatagatcgcctcatcacggggcggctgcagagtttgcagacgtacgtgactcagcagctcatcagagctgctgagatccgtgcgtctgcaaacttggcagccaccaagatgagcgagtgtgtgcttggtcagagcaagcgggtcgatttctgcgggaagggctatcacctgatgtccttcccgcagagcgctccccacggcgtggtcttcctgcacgtgacgtatgtgccggcccaggagaagaacttcaccacggccccggccatatgtcacgacgggaaggcccacttcccccgtgagggggtgttcgtgagcaacggaacccactggttcgtgactcagagaaacttctacgagccacagataattaccactgacaacacttttgtcagtggtaattgcgacgtggtcatagggatcgtgaacaacaccgtttacgatcccctccagccggagctggactccttcaaggaggagctggataagtacttcaagaaccacactagccccgacgttgatctcggggacatctccgggatcaatgctagtgtggtgaatatacagaaggagatcgacaggctcaacgaggtggccaagaacctcaacgagagcctgatcgatctccaggagctgggcaagtacgagcagtacatcaagtggccttggtacatctggctcggcttcatcgcaggactgatcgccatcgtgatggtgaccatcatgctgtgctgcatgaccagctgctgcagctgcctgaagggctgctgcagctgcgggtcatgctgcaagttcgacgaggacgacagcgagccggtcctgaagggagtgaagctgcactacacctgataatctagagccgccgctccagctttgcacgtttcgatcccaaaggccctttttagggccgaccattcattgcaaaaaaaaaaaaaaaaaaaaaaaaaaaaaagcatatgactaaaaaaaaaaaaaaaaaaaaaaaaaaaaaaaaaaaaaa

SEQ ID NO: 194 - RNA, 3894 nt, synthetic construct
  source 1..3894: mol_type = other RNA
agaagctgtctatcgggctccagcggtcatgttcgtgtttctggtgttgttgccgctggtgtcgagccagtgcgtcaacctgatcacgaggacccagagttacaccaactccttcacgcggggagtgtactaccccgacaaggtgttccgctcgtctgtgctgcacagcacgcaggacctcttcctcccgttcttctccaatgtcacgtggttccacgcgatatcggggacgaacgggacgaagaggttcgataaccccgtgctgccgttcaacgacggggtgtacttcgcttcgacagagaagagtaacatcatccgcgggtggatattcggaaccactctcgactccaagacccagtccttgctgatagtgaacaacgccacgaacgtggtcatcaaggtctgcgaattccagttctgcaacgacccgttcctggacgtgtactatcacaagaacaacaagtcttggatggagagtgagttccgagtgtactcatccgcgaacaactgcaccttcgagtacgtcagccagccgttcctgatggacctcgaggggaagcagggcaacttcaagaacctgcgggagttcgtgttcaagaacattgatgggtacttcaagatctactcgaagcacacgcccatcaatcttggacgcgatctcccgcagggcttcagcgccctggagcccctcgtggacctacccattgggatcaacatcacccggttccagacgctcctggccctgcacaggagctacctgacgccgggtgatagctccagtgggtggaccgccggggctgcagcctactacgtgggctacttgcagccccggacgttcttgttgaagtacaacgagaacgggaccatcacggacgcggtggactgcgcgctcgaccctctgtcggagacgaagtgcaccctgaagtcgttcacggtggaaaaggggatctatcagacctccaacttccgggtccagccgactgagagtatcgttcggttccccaacattactaatctgtgccccttcgacgaggtgttcaacgccacgcggttcgcctccgtgtacgcctggaaccggaagcggatctcgaactgcgtggcggactactcagttttgtacaacttcgccccgttcttcgccttcaagtgctacggggtgagccccacaaaactgaacgacctctgcttcaccaacgtgtacgctgactccttcgtgatccgggggaacgaggtgagtcagatagcgcctgggcagacagggaacatcgccgactataactacaagctgcctgatgatttcacggggtgtgtcatcgcctggaacagcaacaagttggactccaaagtgggcgggaactacaactaccggtaccgcctgttccggaagtccaacttgaagccgttcgagcgggacatatccacggagatctatcaggccggcaataagccctgcaacggagtggcaggagttaattgttactttccgctgcagagctacgggttcaggcccacctacggggtggggcaccagccctaccgcgtggtggtcctgagcttcgagctgctgcacgcccccgccaccgtctgtgggcccaagaagtcgacgaacttggtgaagaacaagtgcgtcaacttcaatttcaacgggctcacaggcacgggggtgctgacggagagtaacaagaaattcctgccattccagcagttcgggcgtgatatcgcggataccaccgacgccgtgcgggacccgcagacgttggagatcctcgatatcacgccctgcagcttcgggggcgtcagtgtgatcacccccggtacaaacacctccaaccaggtggcggtgttgtaccagggggtgaattgcactgaggtccccgtggcgattcacgcggaccagctgaccccgacgtggagggtgtactcgacagggagcaacgtcttccagactcgcgctggctgcctgattggcgccgagtacgtgaactcctcgtacgagtgcgacatccccattggggcggggatctgcgcgtcgtaccagacccagacgaagtctcatcggagggcaaggtcggtggccagtcagtccatcatcgcgtacacgatgagcctgggggccgagaacagtgtcgcctatagcaacaactccatcgctatccccaccaacttcacaatcagcgtgaccaccgagatcctgccggtcagcatgaccaagacctcggtggactgcaccatgtatatctgtggggatagcaccgagtgttccaacctgctcctacagtacggctcgttctgcacgcagctgaagcgtgcactgacgggcatcgctgtggagcaggacaagaacactcaggaggtgtttgctcaggtcaagcagatctacaagacgcccccgatcaaatacttcggcggcttcaacttcagccagatcctgcctgacccgagcaagccctccaagaggtccttcatcgaggacctcctgtttaataaggtcacgctggccgacgcgggctttattaaacagtatggagactgcctgggcgacatcgcggcccgcgacctcatctgtgcgcagaagtttaatggactgactgtgctgccgcccttgctcaccgatgagatgatcgcccagtacacgtccgccctgctggcggggaccattaccagcgggtggacgttcggggctggtgcggcgctgcagatccccttcgccatgcagatggcgtaccgcttcaatgggatcggggtcacccagaacgtgctgtacgagaaccagaagctcatcgccaatcagttcaacagcgcgatcgggaagatccaggactccctgtcgagtacagcctccgcgttggggaagctgcaggacgtcgtgaatcacaatgcccaggcgctgaacacgttggtgaagcagctctcgtcgaagttcggcgcgattagtagtgtgctgaacgatattctcagtcggctggaccccccggaggcggaggtccagatagaccggctcatcactggtcgcctccagagtttgcagacgtacgtgactcagcagctcatcagagctgctgagatacgtgcgtctgcaaacctggcggcgaccaagatgagcgagtgcgtgctggggcagagcaagcgggtggatttctgcgggaagggctaccacctgatgtccttcccgcagagcgcacctcacggggtggtcttcctgcacgtgacatatgtgccggcgcaggagaagaacttcaccaccgcgccggccatatgtcacgacgggaaggcgcacttcccgcgtgagggggtcttcgtgagcaacgggacgcactggttcgtcacccagcggaacttctacgagccacagataatcaccactgacaatacctttgtcagtgggaactgcgacgtggtcatcgggatcgtcaacaacacggtgtacgacccccttcagcccgagctggactcgttcaaggaggaactggacaagtacttcaagaaccacacgagcccggatgttgacctcggagacattagcggcatcaatgcctccgtggtcaacatccagaaggagatcgacaggctcaacgaggtggccaagaacctcaacgagagcctgatcgatctccaggagctcggcaagtacgagcagtacattaagtggccatggtatatatggctggggttcatagcagggctgatcgcgatcgtgatggtcacgatcatgctctgctgtatgacctcgtgctgctcgtgcttgaagggctgctgctcgtgtggttcgtgctgcaagttcgacgaggacgactccgagccggtgctgaagggggtcaagctgcactacacctgataagccgccgctccagctttgcacgtttcgatcccaaaggccctttttagggccgacca

SEQ ID NO: 195 - RNA, 3900 nt, synthetic construct
  source 1..3900: mol_type = other RNA
agaagctgtctatcgggctccagcggtcatgttcgtgtttctggtgttgttgccgctggtgtcgagccagtgcgtcaacctgatcacgaggacccagagttacaccaactccttcacgcggggagtgtactaccccgacaaggtgttccgctcgtctgtgctgcacagcacgcaggacctcttcctcccgttcttctccaatgtcacgtggttccacgcgatatcggggacgaacgggacgaagaggttcgataaccccgtgctgccgttcaacgacggggtgtacttcgcttcgacagagaagagtaacatcatccgcgggtggatattcggaaccactctcgactccaagacccagtccttgctgatagtgaacaacgccacgaacgtggtcatcaaggtctgcgaattccagttctgcaacgacccgttcctggacgtgtactatcacaagaacaacaagtcttggatggagagtgagttccgagtgtactcatccgcgaacaactgcaccttcgagtacgtcagccagccgttcctgatggacctcgaggggaagcagggcaacttcaagaacctgcgggagttcgtgttcaagaacattgatgggtacttcaagatctactcgaagcacacgcccatcaatcttggacgcgatctcccgcagggcttcagcgccctggagcccctcgtggacctacccattgggatcaacatcacccggttccagacgctcctggccctgcacaggagctacctgacgccgggtgatagctccagtgggtggaccgccggggctgcagcctactacgtgggctacttgcagccccggacgttcttgttgaagtacaacgagaacgggaccatcacggacgcggtggactgcgcgctcgaccctctgtcggagacgaagtgcaccctgaagtcgttcacggtggaaaaggggatctatcagacctccaacttccgggtccagccgactgagagtatcgttcggttccccaacattactaatctgtgccccttcgacgaggtgttcaacgccacgcggttcgcctccgtgtacgcctggaaccggaagcggatctcgaactgcgtggcggactactcagttttgtacaacttcgccccgttcttcgccttcaagtgctacggggtgagccccacaaaactgaacgacctctgcttcaccaacgtgtacgctgactccttcgtgatccgggggaacgaggtgagtcagatagcgcctgggcagacagggaacatcgccgactataactacaagctgcctgatgatttcacggggtgtgtcatcgcctggaacagcaacaagttggactccaaagtgggcgggaactacaactaccggtaccgcctgttccggaagtccaacttgaagccgttcgagcgggacatatccacggagatctatcaggccggcaataagccctgcaacggagtggcaggagttaattgttactttccgctgcagagctacgggttcaggcccacctacggggtggggcaccagccctaccgcgtggtggtcctgagcttcgagctgctgcacgcccccgccaccgtctgtgggcccaagaagtcgacgaacttggtgaagaacaagtgcgtcaacttcaatttcaacgggctcacaggcacgggggtgctgacggagagtaacaagaaattcctgccattccagcagttcgggcgtgatatcgcggataccaccgacgccgtgcgggacccgcagacgttggagatcctcgatatcacgccctgcagcttcgggggcgtcagtgtgatcacccccggtacaaacacctccaaccaggtggcggtgttgtaccagggggtgaattgcactgaggtccccgtggcgattcacgcggaccagctgaccccgacgtggagggtgtactcgacagggagcaacgtcttccagactcgcgctggctgcctgattggcgccgagtacgtgaactcctcgtacgagtgcgacatccccattggggcggggatctgcgcgtcgtaccagacccagacgaagtctcatcggagggcaaggtcggtggccagtcagtccatcatcgcgtacacgatgagcctgggggccgagaacagtgtcgcctatagcaacaactccatcgctatccccaccaacttcacaatcagcgtgaccaccgagatcctgccggtcagcatgaccaagacctcggtggactgcaccatgtatatctgtggggatagcaccgagtgttccaacctgctcctacagtacggctcgttctgcacgcagctgaagcgtgcactgacgggcatcgctgtggagcaggacaagaacactcaggaggtgtttgctcaggtcaagcagatctacaagacgcccccgatcaaatacttcggcggcttcaacttcagccagatcctgcctgacccgagcaagccctccaagaggtccttcatcgaggacctcctgtttaataaggtcacgctggccgacgcgggctttattaaacagtatggagactgcctgggcgacatcgcggcccgcgacctcatctgtgcgcagaagtttaatggactgactgtgctgccgcccttgctcaccgatgagatgatcgcccagtacacgtccgccctgctggcggggaccattaccagcgggtggacgttcggggctggtgcggcgctgcagatccccttcgccatgcagatggcgtaccgcttcaatgggatcggggtcacccagaacgtgctgtacgagaaccagaagctcatcgccaatcagttcaacagcgcgatcgggaagatccaggactccctgtcgagtacagcctccgcgttggggaagctgcaggacgtcgtgaatcacaatgcccaggcgctgaacacgttggtgaagcagctctcgtcgaagttcggcgcgattagtagtgtgctgaacgatattctcagtcggctggaccccccggaggcggaggtccagatagaccggctcatcactggtcgcctccagagtttgcagacgtacgtgactcagcagctcatcagagctgctgagatacgtgcgtctgcaaacctggcggcgaccaagatgagcgagtgcgtgctggggcagagcaagcgggtggatttctgcgggaagggctaccacctgatgtccttcccgcagagcgcacctcacggggtggtcttcctgcacgtgacatatgtgccggcgcaggagaagaacttcaccaccgcgccggccatatgtcacgacgggaaggcgcacttcccgcgtgagggggtcttcgtgagcaacgggacgcactggttcgtcacccagcggaacttctacgagccacagataatcaccactgacaatacctttgtcagtgggaactgcgacgtggtcatcgggatcgtcaacaacacggtgtacgacccccttcagcccgagctggactcgttcaaggaggaactggacaagtacttcaagaaccacacgagcccggatgttgacctcggagacattagcggcatcaatgcctccgtggtcaacatccagaaggagatcgacaggctcaacgaggtggccaagaacctcaacgagagcctgatcgatctccaggagctcggcaagtacgagcagtacattaagtggccatggtatatatggctggggttcatagcagggctgatcgcgatcgtgatggtcacgatcatgctctgctgtatgacctcgtgctgctcgtgcttgaagggctgctgctcgtgtggttcgtgctgcaagttcgacgaggacgactccgagccggtgctgaagggggtcaagctgcactacacctgataatctagagccgccgctccagctttgcacgtttcgatcccaaaggccctttttagggccgacca

SEQ ID NO: 196 - RNA, 3903 nt, synthetic construct
  source 1..3903: mol_type = other RNA
aggagaagctgtctatcgggctccagcggtcatgttcgtgtttctggtgttgttgccgctggtgtcgagccagtgcgtcaacctgatcacgaggacccagagttacaccaactccttcacgcggggagtgtactaccccgacaaggtgttccgctcgtctgtgctgcacagcacgcaggacctcttcctcccgttcttctccaatgtcacgtggttccacgcgatatcggggacgaacgggacgaagaggttcgataaccccgtgctgccgttcaacgacggggtgtacttcgcttcgacagagaagagtaacatcatccgcgggtggatattcggaaccactctcgactccaagacccagtccttgctgatagtgaacaacgccacgaacgtggtcatcaaggtctgcgaattccagttctgcaacgacccgttcctggacgtgtactatcacaagaacaacaagtcttggatggagagtgagttccgagtgtactcatccgcgaacaactgcaccttcgagtacgtcagccagccgttcctgatggacctcgaggggaagcagggcaacttcaagaacctgcgggagttcgtgttcaagaacattgatgggtacttcaagatctactcgaagcacacgcccatcaatcttggacgcgatctcccgcagggcttcagcgccctggagcccctcgtggacctacccattgggatcaacatcacccggttccagacgctcctggccctgcacaggagctacctgacgccgggtgatagctccagtgggtggaccgccggggctgcagcctactacgtgggctacttgcagccccggacgttcttgttgaagtacaacgagaacgggaccatcacggacgcggtggactgcgcgctcgaccctctgtcggagacgaagtgcaccctgaagtcgttcacggtggaaaaggggatctatcagacctccaacttccgggtccagccgactgagagtatcgttcggttccccaacattactaatctgtgccccttcgacgaggtgttcaacgccacgcggttcgcctccgtgtacgcctggaaccggaagcggatctcgaactgcgtggcggactactcagttttgtacaacttcgccccgttcttcgccttcaagtgctacggggtgagccccacaaaactgaacgacctctgcttcaccaacgtgtacgctgactccttcgtgatccgggggaacgaggtgagtcagatagcgcctgggcagacagggaacatcgccgactataactacaagctgcctgatgatttcacggggtgtgtcatcgcctggaacagcaacaagttggactccaaagtgggcgggaactacaactaccggtaccgcctgttccggaagtccaacttgaagccgttcgagcgggacatatccacggagatctatcaggccggcaataagccctgcaacggagtggcaggagttaattgttactttccgctgcagagctacgggttcaggcccacctacggggtggggcaccagccctaccgcgtggtggtcctgagcttcgagctgctgcacgcccccgccaccgtctgtgggcccaagaagtcgacgaacttggtgaagaacaagtgcgtcaacttcaatttcaacgggctcacaggcacgggggtgctgacggagagtaacaagaaattcctgccattccagcagttcgggcgtgatatcgcggataccaccgacgccgtgcgggacccgcagacgttggagatcctcgatatcacgccctgcagcttcgggggcgtcagtgtgatcacccccggtacaaacacctccaaccaggtggcggtgttgtaccagggggtgaattgcactgaggtccccgtggcgattcacgcggaccagctgaccccgacgtggagggtgtactcgacagggagcaacgtcttccagactcgcgctggctgcctgattggcgccgagtacgtgaactcctcgtacgagtgcgacatccccattggggcggggatctgcgcgtcgtaccagacccagacgaagtctcatcggagggcaaggtcggtggccagtcagtccatcatcgcgtacacgatgagcctgggggccgagaacagtgtcgcctatagcaacaactccatcgctatccccaccaacttcacaatcagcgtgaccaccgagatcctgccggtcagcatgaccaagacctcggtggactgcaccatgtatatctgtggggatagcaccgagtgttccaacctgctcctacagtacggctcgttctgcacgcagctgaagcgtgcactgacgggcatcgctgtggagcaggacaagaacactcaggaggtgtttgctcaggtcaagcagatctacaagacgcccccgatcaaatacttcggcggcttcaacttcagccagatcctgcctgacccgagcaagccctccaagaggtccttcatcgaggacctcctgtttaataaggtcacgctggccgacgcgggctttattaaacagtatggagactgcctgggcgacatcgcggcccgcgacctcatctgtgcgcagaagtttaatggactgactgtgctgccgcccttgctcaccgatgagatgatcgcccagtacacgtccgccctgctggcggggaccattaccagcgggtggacgttcggggctggtgcggcgctgcagatccccttcgccatgcagatggcgtaccgcttcaatgggatcggggtcacccagaacgtgctgtacgagaaccagaagctcatcgccaatcagttcaacagcgcgatcgggaagatccaggactccctgtcgagtacagcctccgcgttggggaagctgcaggacgtcgtgaatcacaatgcccaggcgctgaacacgttggtgaagcagctctcgtcgaagttcggcgcgattagtagtgtgctgaacgatattctcagtcggctggaccccccggaggcggaggtccagatagaccggctcatcactggtcgcctccagagtttgcagacgtacgtgactcagcagctcatcagagctgctgagatacgtgcgtctgcaaacctggcggcgaccaagatgagcgagtgcgtgctggggcagagcaagcgggtggatttctgcgggaagggctaccacctgatgtccttcccgcagagcgcacctcacggggtggtcttcctgcacgtgacatatgtgccggcgcaggagaagaacttcaccaccgcgccggccatatgtcacgacgggaaggcgcacttcccgcgtgagggggtcttcgtgagcaacgggacgcactggttcgtcacccagcggaacttctacgagccacagataatcaccactgacaatacctttgtcagtgggaactgcgacgtggtcatcgggatcgtcaacaacacggtgtacgacccccttcagcccgagctggactcgttcaaggaggaactggacaagtacttcaagaaccacacgagcccggatgttgacctcggagacattagcggcatcaatgcctccgtggtcaacatccagaaggagatcgacaggctcaacgaggtggccaagaacctcaacgagagcctgatcgatctccaggagctcggcaagtacgagcagtacattaagtggccatggtatatatggctggggttcatagcagggctgatcgcgatcgtgatggtcacgatcatgctctgctgtatgacctcgtgctgctcgtgcttgaagggctgctgctcgtgtggttcgtgctgcaagttcgacgaggacgactccgagccggtgctgaagggggtcaagctgcactacacctgataatctagagccgccgctccagctttgcacgtttcgatcccaaaggccctttttagggccgacca

SEQ ID NO: 197 - RNA, 3989 nt, synthetic construct
  source 1..3989: mol_type = other RNA
aggagaagctgtctatcgggctccagcggtcatgttcgtgtttctggtgttgttgccgctggtgtcgagccagtgcgtcaacctgatcacgaggacccagagttacaccaactccttcacgcggggagtgtactaccccgacaaggtgttccgctcgtctgtgctgcacagcacgcaggacctcttcctcccgttcttctccaatgtcacgtggttccacgcgatatcggggacgaacgggacgaagaggttcgataaccccgtgctgccgttcaacgacggggtgtacttcgcttcgacagagaagagtaacatcatccgcgggtggatattcggaaccactctcgactccaagacccagtccttgctgatagtgaacaacgccacgaacgtggtcatcaaggtctgcgaattccagttctgcaacgacccgttcctggacgtgtactatcacaagaacaacaagtcttggatggagagtgagttccgagtgtactcatccgcgaacaactgcaccttcgagtacgtcagccagccgttcctgatggacctcgaggggaagcagggcaacttcaagaacctgcgggagttcgtgttcaagaacattgatgggtacttcaagatctactcgaagcacacgcccatcaatcttggacgcgatctcccgcagggcttcagcgccctggagcccctcgtggacctacccattgggatcaacatcacccggttccagacgctcctggccctgcacaggagctacctgacgccgggtgatagctccagtgggtggaccgccggggctgcagcctactacgtgggctacttgcagccccggacgttcttgttgaagtacaacgagaacgggaccatcacggacgcggtggactgcgcgctcgaccctctgtcggagacgaagtgcaccctgaagtcgttcacggtggaaaaggggatctatcagacctccaacttccgggtccagccgactgagagtatcgttcggttccccaacattactaatctgtgccccttcgacgaggtgttcaacgccacgcggttcgcctccgtgtacgcctggaaccggaagcggatctcgaactgcgtggcggactactcagttttgtacaacttcgccccgttcttcgccttcaagtgctacggggtgagccccacaaaactgaacgacctctgcttcaccaacgtgtacgctgactccttcgtgatccgggggaacgaggtgagtcagatagcgcctgggcagacagggaacatcgccgactataactacaagctgcctgatgatttcacggggtgtgtcatcgcctggaacagcaacaagttggactccaaagtgggcgggaactacaactaccggtaccgcctgttccggaagtccaacttgaagccgttcgagcgggacatatccacggagatctatcaggccggcaataagccctgcaacggagtggcaggagttaattgttactttccgctgcagagctacgggttcaggcccacctacggggtggggcaccagccctaccgcgtggtggtcctgagcttcgagctgctgcacgcccccgccaccgtctgtgggcccaagaagtcgacgaacttggtgaagaacaagtgcgtcaacttcaatttcaacgggctcacaggcacgggggtgctgacggagagtaacaagaaattcctgccattccagcagttcgggcgtgatatcgcggataccaccgacgccgtgcgggacccgcagacgttggagatcctcgatatcacgccctgcagcttcgggggcgtcagtgtgatcacccccggtacaaacacctccaaccaggtggcggtgttgtaccagggggtgaattgcactgaggtccccgtggcgattcacgcggaccagctgaccccgacgtggagggtgtactcgacagggagcaacgtcttccagactcgcgctggctgcctgattggcgccgagtacgtgaactcctcgtacgagtgcgacatccccattggggcggggatctgcgcgtcgtaccagacccagacgaagtctcatcggagggcaaggtcggtggccagtcagtccatcatcgcgtacacgatgagcctgggggccgagaacagtgtcgcctatagcaacaactccatcgctatccccaccaacttcacaatcagcgtgaccaccgagatcctgccggtcagcatgaccaagacctcggtggactgcaccatgtatatctgtggggatagcaccgagtgttccaacctgctcctacagtacggctcgttctgcacgcagctgaagcgtgcactgacgggcatcgctgtggagcaggacaagaacactcaggaggtgtttgctcaggtcaagcagatctacaagacgcccccgatcaaatacttcggcggcttcaacttcagccagatcctgcctgacccgagcaagccctccaagaggtccttcatcgaggacctcctgtttaataaggtcacgctggccgacgcgggctttattaaacagtatggagactgcctgggcgacatcgcggcccgcgacctcatctgtgcgcagaagtttaatggactgactgtgctgccgcccttgctcaccgatgagatgatcgcccagtacacgtccgccctgctggcggggaccattaccagcgggtggacgttcggggctggtgcggcgctgcagatccccttcgccatgcagatggcgtaccgcttcaatgggatcggggtcacccagaacgtgctgtacgagaaccagaagctcatcgccaatcagttcaacagcgcgatcgggaagatccaggactccctgtcgagtacagcctccgcgttggggaagctgcaggacgtcgtgaatcacaatgcccaggcgctgaacacgttggtgaagcagctctcgtcgaagttcggcgcgattagtagtgtgctgaacgatattctcagtcggctggaccccccggaggcggaggtccagatagaccggctcatcactggtcgcctccagagtttgcagacgtacgtgactcagcagctcatcagagctgctgagatacgtgcgtctgcaaacctggcggcgaccaagatgagcgagtgcgtgctggggcagagcaagcgggtggatttctgcgggaagggctaccacctgatgtccttcccgcagagcgcacctcacggggtggtcttcctgcacgtgacatatgtgccggcgcaggagaagaacttcaccaccgcgccggccatatgtcacgacgggaaggcgcacttcccgcgtgagggggtcttcgtgagcaacgggacgcactggttcgtcacccagcggaacttctacgagccacagataatcaccactgacaatacctttgtcagtgggaactgcgacgtggtcatcgggatcgtcaacaacacggtgtacgacccccttcagcccgagctggactcgttcaaggaggaactggacaagtacttcaagaaccacacgagcccggatgttgacctcggagacattagcggcatcaatgcctccgtggtcaacatccagaaggagatcgacaggctcaacgaggtggccaagaacctcaacgagagcctgatcgatctccaggagctcggcaagtacgagcagtacattaagtggccatggtatatatggctggggttcatagcagggctgatcgcgatcgtgatggtcacgatcatgctctgctgtatgacctcgtgctgctcgtgcttgaagggctgctgctcgtgtggttcgtgctgcaagttcgacgaggacgactccgagccggtgctgaagggggtcaagctgcactacacctgataatctagagccgccgctccagctttgcacgtttcgatcccaaaggccctttttagggccgaccattcattgcaaaaaaaaaaaaaaaaaaaaaaaaaaaaaagcatatgactaaaaaaaaaaaaaaaaaaaaaaaaaaaaaaaaaaaaaa

SEQ ID NO: 198 - DNA, 6306 bp, synthetic construct
  source 1..6306: mol_type = other DNA
acgcgtgcctaaattaatacgactcactataaggagaagctgtctatcgggctccagcggtcatgttcgtgttcctggtgctgctgcctctggtgagcagccagtgcgtgaacctgaccacacgcacccagctgccaccggcttacaccaacagcttcacccgcggggtgtactaccccgacaaggtgttcaggtccagtgtgctgcacagcacacaggacctgttcctgcccttcttcagcaacgtgacttggttccatgtgatcagcggcaccaatgggaccaagcgcttcgacaaccccgtgctgccattcaatgacggcgtgtacttcgccagcatcgagaagagtaacatcatcaggggctggatcttcggcaccaccctcgacagcaagacccagtctctgctgatcgtgaacaacgccacgaacgtggtgattaaggtgtgcgagttccagttctgtaatgatcccttcctggatcacaagaataataaatcctggatggagtccgagttcagggtgtactccagcgccaacaattgcaccttcgagtacgtgtcccagcccttcctgatggacctggagggcaagcaggggaacttcaagaatctgagagagttcgtgttcaagaacatcgatggatacttcaagatctactcgaagcacacccccatcatcgtgagggagccagaggacctgccccaggggttcagcgctctggagccactggtggacctgccaatcgggattaatatcaccaggttccagaccctgctggctctgcaccggagctacctgacccctggggacagctcctctggctggaccgccggggctgcggcctactacgtgggctacctgcagccccggacattcctgctgaagtacaacgagaatgggaccatcacggacgctgtggactgcgcgctggaccctctgtccgagaccaagtgtacactgaagagtttcaccgtggagaaggggatctaccagacctccaacttcagggtgcagccgaccgagagcattgtgcgcttcccaaatatcaccaacctgtgccccttcgacgaggtgttcaatgccactcggttcgcttcagtgtacgcttggaatcggaagaggatctccaactgcgtggcggactacagcgtcctgtacaacctggccccattcttcaccttcaagtgctacggggtgtcccccacaaagctgaacgacctgtgcttcactaatgtgtacgcggacagctttgtgatccgcggcgatgaggtgcggcagattgcccccggccagactgggaacatcgccgactacaactacaagctgccagacgacttcaccggctgcgtgatcgcctggaacagcaacaagctggactccaaggtgtctggcaactataactacctgtatcggctgttccggaagagtaacctgaagcccttcgagcgggacatctccaccgagatctaccaggctggaaataagccatgcaacggcgtggcgggcttcaattgctacttccccctgcgctcttacagcttcaggcccacatacggggtggggcaccagccctacagggtggtggtgctgagcttcgagctcctgcacgcccccgccaccgtgtgtgggccgaagaagagtacaaacctggtgaagaacaagtgcgtgaacttcaacttcaacgggctgaaagggacaggagtgctgacagagtccaacaagaaattcctgccctttcagcagtttggacgggacatcgccgacaccaccgacgccgtgagggatccccagaccctggagatcctggacatcacaccctgtagcttcgggggggtgtctgtgatcacgcctgggacaaacacctccaaccaggtggctgtgctgtaccagggcgtgaattgcactgaggtgccagtggcgattcacgccgaccagctgacacccacctggcgggtgtactctaccggctccaatgtgttccagaccagggccggctgcctgatcggggctgagtacgtgaacaacagctacgaatgcgacatccccatcggggccggcatttgtgccagctaccagacacagaccaagtcccacaggcgggcccggagcgtggcctcccagagcatcatcgcctacacaatgagcctgggggccgagaactccgtggcctacagcaacaactccatcgctatccccacaaacttcacaatcagcgtgaccacagagatcctgcctgtctctatgaccaagacctctgtggactgcaccatgtacatctgtggggatagcaccgagtgcagcaacctgctgctgcagtacggcagcttctgcactcagctgaagcgggccctgactgggatcgccgtggagcaggacaagaatacccaggaggtgtttgcccaggtgaagcagatctacaagacaccccccatcaagtacttcggcgggttcaacttctctcagattctgccagaccccagcaagccctccaagcggtccttcattgaggacctgctgtttaacaaggtgaccctggccgacgccgggttcatcaagcagtacggggactgcctgggcgacatcgccgcccgcgacctcatctgtgcgcagaagtttaaggggctgaccgtgctgccccccctgctgacagatgagatgatcgcccagtacacctccgcgctgctggctgggaccatcacctcggggtggacttttggcgctggagccgcgctgcagatccccttcgccatgcagatggcctatcggttcaacgggatcggggtgacacagaacgtgctgtacgagaaccagaagctgatcgccaatcagtttaacagcgccatcgggaagattcaggacagcctgagctccacagcttccgccctggggaagctgcaggatgtggtgaaccacaacgctcaggccctgaacaccctggtgaagcagctgagctccaagtttggggccatctccagcgtgctgaacgacatcttcagcaggctggacccacccgaggccgaggtccagatcgaccggctcatcacggggcggctgcagagcctgcagacctacgtgactcagcagctcatcagagctgctgagatcagggcttctgccaacctggccgccaccaagatgagcgagtgcgtgctgggccagagcaagcgggtggacttctgtgggaagggctaccacctgatgtccttcccacagagcgccccccacggggtggtgttcctgcacgtgacctacgtgcccgctcaggagaagaacttcaccaccgccccggccatttgccacgacggcaaggcccacttccccagggagggcgtgttcgtgtccaacgggacacactggttcgtgacacagcgcaacttctatgagccccagatcatcacaaccgacaacacattcgtgagcgggaactgcgacgtggtgatcgggatcgtgaacaacaccgtgtacgatcccctgcagcctgagctggactccttcaaggaagaactggacaagtacttcaagaaccacacctccccagacgtggatctgggggacatcagcggcatcaacgccagcgtggtgaacatccagaaggagatcgaccggctgaacgaggtggccaagaatctgaatgagtccctgatcgacctccaggagctggggaagtacgagcagtacatcaagtggccctggtacatctggctggggttcatcgccgggctgatcgccatcgtgatggtgaccatcatgctgtgctgcatgaccagctgctgcagctgcctgaaaggctgctgcagctgcgggtcgtgctgcaagttcgacgaggacgacagcgagcccgtgttgaaaggagtgaaactgcactacacctgataatctagagccgccgctccagctttgcacgtttcgatcccaaaggccctttttagggccgaccattcattgcaaaaaaaaaaaaaaaaaaaaaaaaaaaaaagcatatgactaaaaaaaaaaaaaaaaaaaaaaaaaaaaaaaaaaaaaaaaaaaaaaaaaaaaaaaaaaaaaaaaaaaaaaaaaaaaaaaaaaaaaaaagaagagcgtttaaacacgtgatatctggcctcatgggccttcctttcactgcccgctttccagtcgggaaacctgtcgtgccagctgcattaacatggtcatagctgtttccttgcgtattgggcgctctccgcttcctcgctcactgactcgctgcgctcggtcgttcgggtaaagcctggggtgcctaatgagcaaaaggccagcaaaaggccaggaaccgtaaaaaggccgcgttgctggcgtttttccataggctccgcccccctgacgagcatcacaaaaatcgacgctcaagtcagaggtggcgaaacccgacaggactataaagataccaggcgtttccccctggaagctccctcgtgcgctctcctgttccgaccctgccgcttaccggatacctgtccgcctttctcccttcgggaagcgtggcgctttctcatagctcacgctgtaggtatctcagttcggtgtaggtcgttcgctccaagctgggctgtgtgcacgaaccccccgttcagcccgaccgctgcgccttatccggtaactatcgtcttgagtccaacccggtaagacacgacttatcgccactggcagcagccactggtaacaggattagcagagcgaggtatgtaggcggtgctacagagttcttgaagtggtggcctaactacggctacactagaagaacagtatttggtatctgcgctctgctgaagccagttaccttcggaaaaagagttggtagctcttgatccggcaaacaaaccaccgctggtagcggtggtttttttgtttgcaagcagcagattacgcgcagaaaaaaaggatctcaagaagatcctttgatcttttctacggggtctgacgctcagtggaacgaaaactcacgttaagggattttggtcatgaatacacggtgcctgactgcgttagcaatttaactgtgataaactaccgcattaaagcttatcgatgataagctgtcaaacatgagaattcttagaaaaactcatcgagcatcaaatgaaactgcaatttattcatatcaggattatcaataccatatttttgaaaaagccgtttctgtaatgaaggagaaaactcaccgaggcagttccataggatggcaagatcctggtatcggtctgcgattccgactcgtccaacatcaatacaacctattaatttcccctcgtcaaaaataaggttatcaagtgagaaatcaccatgagtgacgactgaatccggtgagaatggcaaaagcttatgcatttctttccagacttgttcaacaggccagccattacgctcgtcatcaaaatcactcgcatcaaccaaaccgttattcattcgtgattgcgcctgagcgagacgaaatacgcgatcgctgttaaaaggacaattacaaacaggaatcgaatgcaaccggcgcaggaacactgccagcgcatcaacaatattttcacctgaatcaggatattcttctaatacctggaatgctgttttcccggggatcgcagtggtgagtaaccatgcatcatcaggagtacggataaaatgcttgatggtcggaagaggcataaattccgtcagccagtttagtctgaccatctcatctgtaacatcattggcaacgctacctttgccatgtttcagaaacaactctggcgcatcgggcttcccatacaatcgatagattgtcgcacctgattgcccgacattatcgcgagcccatttatacccatataaatcagcatccatgttggaatttaatcgcggcctcgagcaagacgtttcccgttgaatatggctcataacaccccttgtattactgtttatgtaagcagacagttttattgttcatgagcggatacatatttgaatgtatttagaaaaataaacaaataggggttccgcgcacatttccccgaaaagtgccacctaaattgtaagcgttaatattttgttaaaattcgcgttaaatttttgttaaatcagctcattttttaaccaataggccgaaatcggcaaaatcccttataaatcaaaagaatagaccgagatagggttgagtggccgctacagggcgctcccattcgccattcaggctgcgcaactgttgggaagggcgtttcggtgcgggcctcttcgctattacgccagctggcgaaagggggatgtgctgcaaggcgattaagttgggtaacgccagggttttcccagtcac

SEQ ID NO: 199 - DNA, 6306 bp, synthetic construct
  source 1..6306: mol_type = other DNA
acgcgtgcctaaattaatacgactcactataaggagaagctgtctatcgggctccagcggtcatgttcgtgttcctggtgctgctccccctggtcagctcacagtgcgtgaacctgaccactcgcacacagctgcccccagcttacactaactccttcacccgcggggtgtactaccccgacaaggtgttcaggagtagtgtgctgcacagcacccaggacctctttctcccattcttctccaacgtcacgtggttccacgtgatcagcgggacaaatgggacaaagaggttcgacaaccctgtgctgcccttcaacgatggggtgtacttcgcctccatcgagaagagtaacatcatcaggggctggatctttgggaccaccctggactcaaagacccagtccctgctgatcgtgaacaacgccaccaatgtggtcatcaaggtgtgcgagttccagttctgcaacgatccattcctggatcacaaaaacaacaagagctggatggagagtgagttccgggtgtacagcagcgcgaacaactgcacgttcgaatacgtgtcacagccattcctgatggacctggaggggaagcagggcaattttaagaacctgcgcgagttcgtcttcaagaacatcgacgggtattttaagatctactccaagcacacacccatcatcgtcagggagcccgaggatctgccccagggcttctctgccctggagccgctggtggacctccccataggaattaacatcaccaggttccagacactcctggccctgcacaggagctacctgacacctggtgacagttccagtgggtggacggccggggctgcagcctactacgtgggctacctgcagccccggaccttcctgctgaagtacaacgagaatgggaccattacagacgctgtggactgcgcactggatcctctgtccgagaccaagtgtacactgaagagtttcaccgtggagaaggggatctaccagacctccaacttcagggtgcagccgaccgagagcattgtgcgcttcccaaatatcacaaacctgtgccccttcgacgaggtgttcaatgctactcggttcgcttcagtgtacgcttggaatcggaagaggatcagcaactgcgtggcagactacagcgtcctgtacaacctggccccattcttcacattcaagtgctacggcgtctcccccacgaagctgaatgacctgtgcttcaccaacgtgtacgcagacagcttcgtgatccggggagacgaggtccgccagatcgctccagggcagaccggcaacatcgccgactacaactacaagctccctgacgacttcaccgggtgtgtgatcgcttggaacagcaacaagctggacagcaaggtgtccggcaactacaactacctgtaccgcctgtttcgcaagtccaacctgaagcccttcgagcgggatatctccacagagatctaccaggctggcaacaagccctgcaacggcgtggcgggcttcaactgctacttcccactgaggtcttactccttcaggcccacatacggggtggggcaccagccctaccgcgtggtggtgctcagctttgagctcctccacgcccccgccaccgtgtgtgggcccaagaagagtaccaacctggtgaagaacaagtgcgtgaacttcaacttcaacgggctcaaggggaccggcgtcctcaccgagtccaacaagaagttcctgcccttccagcagtttggcagagacatcgccgacactacagacgcggtccgggatccccagaccctggagatcctggacatcacgccctgtagcttcggcggtgtctctgtcatcactcccggtaccaacacatccaaccaggtggcggtgctgtaccagggcgtgaattgcactgaggtgccagtggcaattcacgccgatcagctgacacccacctggcgggtgtacagtaccgggagcaacgtgttccagacacgggcaggatgtctgatcggcgctgagtacgtgaacaacagctacgagtgcgacatccccattggagcgggcatctgcgccagctaccagacccagactaagagccacaggcgggcccgctctgtggcctcacagagcatcatcgcctacactatgagtctgggggctgagaacagcgtggcctactccaacaacagcatcgcaatcccaaccaacttcacaatcagcgtcaccacggagatcctgcccgtgtctatgaccaagacctcagtggactgcacaatgtacatctgcggggacagcaccgagtgttccaacctcctgctccagtacggcagtttctgtacacagctcaaaagggccctgacaggtatagccgtggagcaggacaagaacactcaggaggtgttcgcgcaggtgaagcagatctacaagactcctcccatcaagtactttggagggtttaacttcagccagatcctgcctgaccccagcaaaccctccaagaggagcttcatcgaggatctgctctttaacaaagtcaccctcgccgacgcagggttcattaagcagtacggtgactgtctgggagatatcgccgctcgggatctcatctgtgcgcagaagttcaagggactgaccgtcctgccacccctgctcacggatgagatgatcgcccagtacaccagcgccctgctggctgggacgatcacttcaggttggactttcggggcaggcgccgccctgcagatccccttcgccatgcagatggcctacaggttcaacgggatcggcgtgacacagaatgtgctgtacgagaatcagaagctgatcgccaaccagttcaacagcgcgatcggcaagatccaggactcactctccagcaccgcaagcgccctggggaagctccaggacgtggtcaaccacaacgcacaggctctgaacaccctcgtcaagcagctgagcagcaagttcggcgccatctcttctgtgctgaatgacatcttcagccggctggatcccccagaggctgaggtccagatcgaccggctgatcactggtcggctgcagagtctgcagacctacgtgactcagcagctgatcagggcagccgagatccgggcctcagccaacctggccgccacgaagatgtcagagtgcgtgctgggccagtccaagagggtggacttctgtgggaagggctaccacctgatgtccttcccacagagcgcccctcacggagtggtgttcctgcacgtcacctacgtgccagcacaggagaagaacttcacaacagctcccgcaatctgccacgacgggaaggcccacttcccccgggagggggtcttcgtgtcaaacggcacccactggttcgtgacacagcgcaacttctacgagccacagatcatcaccactgacaacaccttcgtcagtgggaactgtgacgtggtgatcggcatcgtcaacaacaccgtgtacgacccccttcaacccgaactggatagcttcaaggaggagctggacaagtacttcaagaaccacacctccccagacgtggacctgggcgacattagcggcatcaacgctagtgtcgtcaacatccagaaggagatcgacaggctcaacgaggtggccaaaaacctcaacgagagcctgatcgatctccaggagctggggaagtacgagcagtacatcaagtggccttggtacatctggctcgggttcatcgcagggctgatcgccatcgtgatggtgacaatcatgctgtgctgcatgaccagctgctgcagctgcctgaagggctgctgcagctgcgggagctgttgcaagttcgacgaggacgactcagagcctgtgctcaagggggtgaagctgcactatacttgataatctagagccgccgctccagctttgcacgtttcgatcccaaaggccctttttagggccgaccattcattgcaaaaaaaaaaaaaaaaaaaaaaaaaaaaaagcatatgactaaaaaaaaaaaaaaaaaaaaaaaaaaaaaaaaaaaaaaaaaaaaaaaaaaaaaaaaaaaaaaaaaaaaaaaaaaaaaaaaaaaaaaaagaagagcgtttaaacacgtgatatctggcctcatgggccttcctttcactgcccgctttccagtcgggaaacctgtcgtgccagctgcattaacatggtcatagctgtttccttgcgtattgggcgctctccgcttcctcgctcactgactcgctgcgctcggtcgttcgggtaaagcctggggtgcctaatgagcaaaaggccagcaaaaggccaggaaccgtaaaaaggccgcgttgctggcgtttttccataggctccgcccccctgacgagcatcacaaaaatcgacgctcaagtcagaggtggcgaaacccgacaggactataaagataccaggcgtttccccctggaagctccctcgtgcgctctcctgttccgaccctgccgcttaccggatacctgtccgcctttctcccttcgggaagcgtggcgctttctcatagctcacgctgtaggtatctcagttcggtgtaggtcgttcgctccaagctgggctgtgtgcacgaaccccccgttcagcccgaccgctgcgccttatccggtaactatcgtcttgagtccaacccggtaagacacgacttatcgccactggcagcagccactggtaacaggattagcagagcgaggtatgtaggcggtgctacagagttcttgaagtggtggcctaactacggctacactagaagaacagtatttggtatctgcgctctgctgaagccagttaccttcggaaaaagagttggtagctcttgatccggcaaacaaaccaccgctggtagcggtggtttttttgtttgcaagcagcagattacgcgcagaaaaaaaggatctcaagaagatcctttgatcttttctacggggtctgacgctcagtggaacgaaaactcacgttaagggattttggtcatgaatacacggtgcctgactgcgttagcaatttaactgtgataaactaccgcattaaagcttatcgatgataagctgtcaaacatgagaattcttagaaaaactcatcgagcatcaaatgaaactgcaatttattcatatcaggattatcaataccatatttttgaaaaagccgtttctgtaatgaaggagaaaactcaccgaggcagttccataggatggcaagatcctggtatcggtctgcgattccgactcgtccaacatcaatacaacctattaatttcccctcgtcaaaaataaggttatcaagtgagaaatcaccatgagtgacgactgaatccggtgagaatggcaaaagcttatgcatttctttccagacttgttcaacaggccagccattacgctcgtcatcaaaatcactcgcatcaaccaaaccgttattcattcgtgattgcgcctgagcgagacgaaatacgcgatcgctgttaaaaggacaattacaaacaggaatcgaatgcaaccggcgcaggaacactgccagcgcatcaacaatattttcacctgaatcaggatattcttctaatacctggaatgctgttttcccggggatcgcagtggtgagtaaccatgcatcatcaggagtacggataaaatgcttgatggtcggaagaggcataaattccgtcagccagtttagtctgaccatctcatctgtaacatcattggcaacgctacctttgccatgtttcagaaacaactctggcgcatcgggcttcccatacaatcgatagattgtcgcacctgattgcccgacattatcgcgagcccatttatacccatataaatcagcatccatgttggaatttaatcgcggcctcgagcaagacgtttcccgttgaatatggctcataacaccccttgtattactgtttatgtaagcagacagttttattgttcatgagcggatacatatttgaatgtatttagaaaaataaacaaataggggttccgcgcacatttccccgaaaagtgccacctaaattgtaagcgttaatattttgttaaaattcgcgttaaatttttgttaaatcagctcattttttaaccaataggccgaaatcggcaaaatcccttataaatcaaaagaatagaccgagatagggttgagtggccgctacagggcgctcccattcgccattcaggctgcgcaactgttgggaagggcgtttcggtgcgggcctcttcgctattacgccagctggcgaaagggggatgtgctgcaaggcgattaagttgggtaacgccagggttttcccagtcac

SEQ ID NO: 200 - DNA, 6306 bp, synthetic construct
  source 1..6306: mol_type = other DNA
acgcgtgcctaaattaatacgactcactataaggagaagctgtctatcgggctccagcggtcatgttcgtgttcctggtgctgcttccgctggtcagcagccagtgcgtgaacctgaccacgcggacgcagctgccacccgcgtacaccaatagcttcactcggggggtctactacccggacaaggtcttccggagcagcgtgctgcacagcacgcaggacctcttcctgccgttcttctcgaacgtcacgtggttccacgtgatcagcgggacgaacggcacgaagaggttcgacaaccccgtgctcccgttcaatgacggggtgtatttcgccagcatcgagaagagtaacatcattcgggggtggatcttcggcactaccttggactccaagacgcagagcctgctcatcgtgaacaacgccaccaacgtggtgatcaaggtctgcgagttccagttctgcaacgaccccttcttggaccacaagaacaacaagagctggatggagtccgagttcagagtctacagcagcgccaacaattgcaccttcgaatacgtgagccagccgttcctgatggacctggaaggcaagcagggcaacttcaagaacttgcgcgagtttgtcttcaagaacatcgacggctacttcaagatctacagcaagcacacccccatcattgtgcgggagccggaggacctgccgcagggcttcagcgctctggagccgctggtggacctgcccatcggcatcaacatcacgcggttccagacgctgttggccctgcacaggtcctacctgactccgggagactccagctccgggtggacggccggggctgcagcctactatgtgggctacctgcagccccggaccttcttgttgaagtacaacgagaacggcacgatcacggacgccgtggattgtgccttggaccccctgagcgagaccaagtgtaccctgaagtccttcaccgtggagaaggggatctaccagacctccaacttccgggtccagccgactgagagcatcgtgcggtttcccaacattaccaacttgtgccccttcgatgaggtgttcaacgccacgcggttcgccagcgtgtacgcctggaacaggaagcgcatcagcaactgcgtggccgactactcagtgttgtacaacctcgccccgttcttcaccttcaagtgctacggggtgagccctacaaagctgaacgacctctgcttcaccaacgtgtacgccgacagctttgtgattcgcggcgacgaggtccggcagatcgccccagggcagaccggcaatatcgctgactacaactacaagctgcctgacgatttcaccgggtgcgtgatcgcctggaacagcaacaagctggacagcaaggtgtcagggaactacaattacctgtaccggttgttcaggaagagtaacctgaagccgttcgagcgtgacatcagcaccgagatctaccaggccggcaacaagccctgcaacggggtggcgggattcaactgctactttccgttgcgctcctattcctttcggcccacctacggggtgggccaccagccctacagggtggtggtgctctccttcgagctgctccacgcaccggccacggtgtgtgggccgaagaagagtaccaacctggtgaagaataagtgcgtcaacttcaacttcaacgggctgaaaggaacaggagtgctgacggagagcaacaagaaattcctgccattccagcagttcgggcgcgacatcgctgacaccaccgacgctgtgcgggacccccagaccctggagatcctggacatcaccccttgcagcttcggcggcgtcagcgtgatcacgcccgggaccaacacatccaaccaggtggccgtgctgtaccagggcgtgaactgcaccgaggtgccggtggccatccacgccgatcagctgacgcccacctggcgggtgtactccacgggcagcaacgtcttccagacacgcgccggctgcttgatcggagccgagtacgtcaataacagctacgagtgcgacattcccatcggggccgggatctgcgccagctaccagacgcagaccaagtcccaccggcgcgctcggagcgtggcctcccagagcatcatcgcctacacgatgagcctgggggccgagaacagcgtcgcttatagcaacaacagcatcgctatccccaccaactttacaattagcgtgaccacggagatcttgcccgtcagcatgaccaagacctccgtggactgcaccatgtacatctgcggggatagcaccgagtgctccaacctgctcctgcagtacgggtccttctgcacgcagttgaagcgcgcattgaccggcatcgcagtggagcaggacaagaacacgcaggaggtgtttgctcaggtcaagcagatctacaagacgcccccgatcaagtacttcgggggcttcaacttcagccagatcctgcctgacccgagcaagccctccaagcgtagcttcatcgaggacctgctgttcaataaagtgacgctggcagacgccggcttcatcaagcagtacggcgactgtctgggggacatcgctgcccgggacctcatctgtgcccagaagttcaagggcctcacggtcctgccgcccctgctcacagatgagatgatcgcccagtacacgagcgccctgctcgctgggaccatcaccagcgggtggacgttcggcgcgggcgctgcattacagatccccttcgcgatgcagatggcctacagatttaacggtatcggcgtcacgcagaacgtgctgtacgagaaccagaagctgatcgccaaccagttcaacagcgccatcgggaagatccaggacagcttgagcagcaccgcctctgccctggggaagctgcaggacgtcgtgaatcacaatgcccaggccttgaacacgttggtgaagcagctctcatcgaagttcggcgccatcagcagcgtgctgaacgacatcttcagtcggctggaccccccggaggcggaggtccagatcgaccgcctgatcacggggaggctgcagagcttgcagacgtacgtgactcagcagctcatcagggctgctgagatccgggcgtctgccaacctggctgccaccaagatgtccgaatgcgtcttggggcagtccaagcgggtggacttctgcgggaagggctaccacctgatgtccttcccgcagagcgcaccccacggggtggtgttcctgcacgtcacctacgtgccggctcaggagaagaacttcaccacagctcccgcaatctgccacgacgggaaggcccacttcccccgggaaggggtcttcgtgtcgaacggcacccactggttcgtcacgcagcgcaacttctacgagccacagatcatcaccactgacaacaccttcgtcagtgggaactgcgacgtggtcatcgggatcgtcaacaacacggtgtacgatcccctgcagcccgagctggatagcttcaaggaggagctggacaagtacttcaagaaccacacttccccggatgtggacctcggggacatcagcggaatcaacgcctccgtggtcaacatccagaaggagatcgacaggctcaacgaggtggcaaagaacctcaacgagagcctgatcgatctccaggagctggggaagtatgagcagtacatcaagtggccctggtacatctggctcgggttcatcgcagggttgatcgccatcgtgatggtgacgatcatgttgtgctgcatgacgagctgctgcagctgcctgaagggctgctgcagctgcgggagctgctgtaagttcgacgaggacgattccgagccggtgctgaagggcgtgaagctgcactacacctgataatctagagccgccgctccagctttgcacgtttcgatcccaaaggccctttttagggccgaccattcattgcaaaaaaaaaaaaaaaaaaaaaaaaaaaaaagcatatgactaaaaaaaaaaaaaaaaaaaaaaaaaaaaaaaaaaaaaaaaaaaaaaaaaaaaaaaaaaaaaaaaaaaaaaaaaaaaaaaaaaaaaaaagaagagcgtttaaacacgtgatatctggcctcatgggccttcctttcactgcccgctttccagtcgggaaacctgtcgtgccagctgcattaacatggtcatagctgtttccttgcgtattgggcgctctccgcttcctcgctcactgactcgctgcgctcggtcgttcgggtaaagcctggggtgcctaatgagcaaaaggccagcaaaaggccaggaaccgtaaaaaggccgcgttgctggcgtttttccataggctccgcccccctgacgagcatcacaaaaatcgacgctcaagtcagaggtggcgaaacccgacaggactataaagataccaggcgtttccccctggaagctccctcgtgcgctctcctgttccgaccctgccgcttaccggatacctgtccgcctttctcccttcgggaagcgtggcgctttctcatagctcacgctgtaggtatctcagttcggtgtaggtcgttcgctccaagctgggctgtgtgcacgaaccccccgttcagcccgaccgctgcgccttatccggtaactatcgtcttgagtccaacccggtaagacacgacttatcgccactggcagcagccactggtaacaggattagcagagcgaggtatgtaggcggtgctacagagttcttgaagtggtggcctaactacggctacactagaagaacagtatttggtatctgcgctctgctgaagccagttaccttcggaaaaagagttggtagctcttgatccggcaaacaaaccaccgctggtagcggtggtttttttgtttgcaagcagcagattacgcgcagaaaaaaaggatctcaagaagatcctttgatcttttctacggggtctgacgctcagtggaacgaaaactcacgttaagggattttggtcatgaatacacggtgcctgactgcgttagcaatttaactgtgataaactaccgcattaaagcttatcgatgataagctgtcaaacatgagaattcttagaaaaactcatcgagcatcaaatgaaactgcaatttattcatatcaggattatcaataccatatttttgaaaaagccgtttctgtaatgaaggagaaaactcaccgaggcagttccataggatggcaagatcctggtatcggtctgcgattccgactcgtccaacatcaatacaacctattaatttcccctcgtcaaaaataaggttatcaagtgagaaatcaccatgagtgacgactgaatccggtgagaatggcaaaagcttatgcatttctttccagacttgttcaacaggccagccattacgctcgtcatcaaaatcactcgcatcaaccaaaccgttattcattcgtgattgcgcctgagcgagacgaaatacgcgatcgctgttaaaaggacaattacaaacaggaatcgaatgcaaccggcgcaggaacactgccagcgcatcaacaatattttcacctgaatcaggatattcttctaatacctggaatgctgttttcccggggatcgcagtggtgagtaaccatgcatcatcaggagtacggataaaatgcttgatggtcggaagaggcataaattccgtcagccagtttagtctgaccatctcatctgtaacatcattggcaacgctacctttgccatgtttcagaaacaactctggcgcatcgggcttcccatacaatcgatagattgtcgcacctgattgcccgacattatcgcgagcccatttatacccatataaatcagcatccatgttggaatttaatcgcggcctcgagcaagacgtttcccgttgaatatggctcataacaccccttgtattactgtttatgtaagcagacagttttattgttcatgagcggatacatatttgaatgtatttagaaaaataaacaaataggggttccgcgcacatttccccgaaaagtgccacctaaattgtaagcgttaatattttgttaaaattcgcgttaaatttttgttaaatcagctcattttttaaccaataggccgaaatcggcaaaatcccttataaatcaaaagaatagaccgagatagggttgagtggccgctacagggcgctcccattcgccattcaggctgcgcaactgttgggaagggcgtttcggtgcgggcctcttcgctattacgccagctggcgaaagggggatgtgctgcaaggcgattaagttgggtaacgccagggttttcccagtcac

SEQ ID NO: 201 - DNA, 6306 bp, synthetic construct
  source 1..6306: mol_type = other DNA
acgcgtgcctaaattaatacgactcactataaggagaagctgtctatcgggctccagcggtcatgttcgtgttcctggtgctgctgccgctggtcagttcgcagtgcgtgaacctgaccacgcggacgcagctgccacccgcgtacactaacagtttcactcggggggtctactacccggataaggtcttccggagtagcgtgctgcacagcacgcaggacctcttcctcccgttcttctcgaatgtcacgtggttccacgtgatcagcgggacgaacgggacgaagaggttcgacaaccccgtgctcccgttcaatgatggggtgtacttcgccagcatcgagaagagtaacatcattcgagggtggatctttggcactaccctggactccaagactcagagtctgctcatagtcaacaatgccaccaacgtggtgatcaaggtctgtgagttccagttctgcaacgatccattcctggatcacaagaataacaagagctggatggagtctgagttcagagtctatagtagtgccaacaactgcaccttcgagtatgtgagccagccgttcctgatggaccttgaaggcaagcagggcaacttcaagaacctgcgcgagtttgtcttcaagaacatcgacggctacttcaagatatacagcaagcacacccccatcattgtgcgggagccggaggacctgccgcagggcttcagcgctctggagccgctggtggatttgccgatcggcatcaacatcacgcggttccagacgctgttggccctgcacaggtcctacctgactccgggggactccagctccgggtggacggccggggctgcagcctactacgtgggctacttgcagccccggaccttcttgttgaagtacaacgagaacggcacaatcacggacgccgtggattgtgccctggaccccctgagtgagaccaagtgtaccctgaagtccttcaccgtggagaaggggatctatcagacctccaacttccgggtccagccgactgagagcatcgtgcggttccccaacatcacgaacttgtgcccctttgatgaggtgttcaacgccacgcggttcgcgagcgtgtacgcctggaacaggaagcgcatcagcaactgcgtggcagattattcagtgttgtacaacctcgccccgttcttcaccttcaagtgctacggggtgagccccacaaaactgaatgatctctgcttcaccaacgtgtacgccgatagctttgtgattcgcggcgacgaagtccggcagatcgccccagggcagaccggcaacatcgccgactacaactacaagctgcctgacgattttaccggttgcgtgattgcctggaacagcaacaagctggactcgaaggtgtcagggaactacaactacctgtaccggttgttcagaaagagcaacctgaagccgttcgagcgtgacatcagcaccgagatctaccaggccggcaacaagccctgcaacggagtggcaggcttcaactgttactttccgttgcgctcctactcctttcggcccacctacggggtgggccaccagccctatagggtggtggtgctctccttcgagctgctccacgcgccggccacggtgtgtgggccgaagaagagtaccaacctggtgaagaacaagtgcgtcaacttcaacttcaacgggctgaagggaacaggggtgctgacggagagtaacaagaagttcctgccattccagcagttcgggcgtgacatcgctgacaccaccgacgctgtgcgggatccccagaccctcgagatcctggacatcaccccgtgcagcttcggtggtgtcagcgtgatcacgcccgggaccaacacctccaaccaggtggccgtgctgtaccagggcgtgaattgcaccgaggtgccggtggcaattcacgccgaccagctgacgcccacctggcgggtgtactccacgggcagcaacgtcttccagacccgcgccggctgcttgatcggggccgagtacgtgaacaacagctacgagtgcgatatcccgatcggggccgggatctgcgcctcctaccagacgcagaccaagtcccatcggcgcgctcgtagcgtggcctcccagagcatcatcgcctacacgatgagcctgggggccgagaactccgtcgcgtacagcaacaactccatcgctatccccacaaattttacaattagcgtgaccacggagatcttgcccgtcagcatgaccaagacctccgtggactgcaccatgtacatttgtggggatagcaccgagtgttccaacctgctcctgcagtacgggtccttctgcacgcagctgaagcgtgccctgaccggtattgcagtggagcaggacaagaacactcaggaggtgtttgctcaggtcaagcagatctacaagacgcccccgattaaatacttcgggggcttcaactttagccagatcctgcccgacccgagcaagccctccaagcggagcttcattgaggacctgctctttaacaaggtgacgctggcagacgccggcttcatcaagcagtacggcgactgtctgggggacatcgctgcccgggacctcatctgtgcccagaagttcaagggcctcacggtcctgccgcctctgctcacagatgagatgatcgcccagtacacgagcgctctgctcgctgggaccatcaccagcgggtggacgttcggtgctggggcggcattacagatcccctttgccatgcagatggcctacagattcaacgggattggtgtcacgcagaacgtgctgtacgagaaccagaagctgattgccaaccagttcaacagcgcaatcggtaagatccaggacagcttgagcagcaccgcctctgccctggggaagctgcaggacgtcgtgaatcacaacgcccaggccctgaacacgttggtgaagcagctctcatcaaagttcggcgcaatcagcagcgtgctgaacgacatcttcagtcggctggaccccccggaggctgaggtccagatagatcgcctcatcacgggaaggcttcagagtttgcagacgtacgtgactcagcagctcatccgggctgctgagatccgtgcgtctgcaaacctggctgccaccaagatgagcgagtgcgtcttggggcagtcaaagcgggtggacttctgcgggaagggctaccacctgatgtccttcccgcagagcgcaccccacggggtggtgttccttcacgtcacctacgtgccggctcaggagaagaacttcacaacagctcccgccatctgccacgacgggaaggcccacttcccccgggaaggggtcttcgtgtcgaatggcacccactggttcgtcacgcagcgcaacttctatgagccacagatcatcaccactgacaacaccttcgtcagtgggaactgcgatgtggtcatagggatcgtcaacaacacggtgtacgatcccctgcagcccgagctggatagcttcaaggaggagctggacaagtacttcaagaatcatacttccccggatgttgacctcggggacatcagcggcatcaacgcctccgtggtcaacatccagaaggagatcgacaggctcaacgaggtggcaaaaaacctcaacgagagcctgatcgatctccaggagctggggaagtatgagcagtacatcaagtggccttggtacatctggctcgggttcatcgcagggctgatcgccatcgtgatggtgacgatcatgttgtgctgcatgacgagctgctgcagctgcctgaagggctgctgcagctgcgggagctgttgcaagttcgacgaggacgactccgagccggtgctgaagggcgtgaagctgcactacacctgataatctagagccgccgctccagctttgcacgtttcgatcccaaaggccctttttagggccgaccattcattgcaaaaaaaaaaaaaaaaaaaaaaaaaaaaaagcatatgactaaaaaaaaaaaaaaaaaaaaaaaaaaaaaaaaaaaaaaaaaaaaaaaaaaaaaaaaaaaaaaaaaaaaaaaaaaaaaaaaaaaaaaaagaagagcgtttaaacacgtgatatctggcctcatgggccttcctttcactgcccgctttccagtcgggaaacctgtcgtgccagctgcattaacatggtcatagctgtttccttgcgtattgggcgctctccgcttcctcgctcactgactcgctgcgctcggtcgttcgggtaaagcctggggtgcctaatgagcaaaaggccagcaaaaggccaggaaccgtaaaaaggccgcgttgctggcgtttttccataggctccgcccccctgacgagcatcacaaaaatcgacgctcaagtcagaggtggcgaaacccgacaggactataaagataccaggcgtttccccctggaagctccctcgtgcgctctcctgttccgaccctgccgcttaccggatacctgtccgcctttctcccttcgggaagcgtggcgctttctcatagctcacgctgtaggtatctcagttcggtgtaggtcgttcgctccaagctgggctgtgtgcacgaaccccccgttcagcccgaccgctgcgccttatccggtaactatcgtcttgagtccaacccggtaagacacgacttatcgccactggcagcagccactggtaacaggattagcagagcgaggtatgtaggcggtgctacagagttcttgaagtggtggcctaactacggctacactagaagaacagtatttggtatctgcgctctgctgaagccagttaccttcggaaaaagagttggtagctcttgatccggcaaacaaaccaccgctggtagcggtggtttttttgtttgcaagcagcagattacgcgcagaaaaaaaggatctcaagaagatcctttgatcttttctacggggtctgacgctcagtggaacgaaaactcacgttaagggattttggtcatgaatacacggtgcctgactgcgttagcaatttaactgtgataaactaccgcattaaagcttatcgatgataagctgtcaaacatgagaattcttagaaaaactcatcgagcatcaaatgaaactgcaatttattcatatcaggattatcaataccatatttttgaaaaagccgtttctgtaatgaaggagaaaactcaccgaggcagttccataggatggcaagatcctggtatcggtctgcgattccgactcgtccaacatcaatacaacctattaatttcccctcgtcaaaaataaggttatcaagtgagaaatcaccatgagtgacgactgaatccggtgagaatggcaaaagcttatgcatttctttccagacttgttcaacaggccagccattacgctcgtcatcaaaatcactcgcatcaaccaaaccgttattcattcgtgattgcgcctgagcgagacgaaatacgcgatcgctgttaaaaggacaattacaaacaggaatcgaatgcaaccggcgcaggaacactgccagcgcatcaacaatattttcacctgaatcaggatattcttctaatacctggaatgctgttttcccggggatcgcagtggtgagtaaccatgcatcatcaggagtacggataaaatgcttgatggtcggaagaggcataaattccgtcagccagtttagtctgaccatctcatctgtaacatcattggcaacgctacctttgccatgtttcagaaacaactctggcgcatcgggcttcccatacaatcgatagattgtcgcacctgattgcccgacattatcgcgagcccatttatacccatataaatcagcatccatgttggaatttaatcgcggcctcgagcaagacgtttcccgttgaatatggctcataacaccccttgtattactgtttatgtaagcagacagttttattgttcatgagcggatacatatttgaatgtatttagaaaaataaacaaataggggttccgcgcacatttccccgaaaagtgccacctaaattgtaagcgttaatattttgttaaaattcgcgttaaatttttgttaaatcagctcattttttaaccaataggccgaaatcggcaaaatcccttataaatcaaaagaatagaccgagatagggttgagtggccgctacagggcgctcccattcgccattcaggctgcgcaactgttgggaagggcgtttcggtgcgggcctcttcgctattacgccagctggcgaaagggggatgtgctgcaaggcgattaagttgggtaacgccagggttttcccagtcac

SEQ ID NO: 202 - DNA, 6306 bp, synthetic construct
  source 1..6306: mol_type = other DNA
acgcgtgcctaaattaatacgactcactataaggagaagctgtctatcgggctccagcggtcatgttcgtgttcctggtgttgttgccgctggtgtcgagccagtgcgtcaacctgacgacacggacacagctgccccccgcgtacacgaactcgttcacgcggggggtgtactacccagacaaggtcttcaggagcagcgtgctgcacagcacgcaggacctcttcctcccgttcttctccaatgtcacgtggttccacgtgatatcggggacgaacgggacgaagaggttcgacaaccccgtgctcccgttcaatgacggggtgtacttcgcgtcgatcgagaagagtaacatcattcgagggtggatttttggcactaccctggactcgaagactcagagcctgctcatagtcaacaacgccaccaacgtggtgatcaaggtctgtgagttccagttctgcaacgacccgttcttggaccacaagaacaacaagagctggatggagtctgagtttcgagtctacagtagtgccaacaattgcaccttcgaatatgtgagccagccgttcctgatggacctggagggcaagcagggcaacttcaagaacttgcgcgagtttgtcttcaagaacatcgacggctacttcaagatctactcgaagcacaccccgatcattgtgcgggagccggaggacctgccgcagggcttcagcgctctggaaccgctggtggacttgcccatcggcatcaacatcacgcggttccagacgctgctggccctgcacaggtcctacctgactccgggagactcttcgtcggggtggaccgcgggtgcagccgcctactacgtgggctacctgcagccgcggacgttcttgttgaagtacaacgagaacggcacaatcaccgacgcggtggattgtgccctcgacccgctgagcgagaccaagtgcacactcaagagcttcacggtggagaaggggatctatcagacctccaacttccgggtccagccgactgagagcatcgttcggttcccgaacatcaccaacctgtgcccgtttgacgaggtgttcaacgccacgcggttcgcgtccgtgtacgcctggaaccggaaacggatctcgaactgcgtggcggactactcagtgttgtacaacctcgccccgttcttcaccttcaagtgctacggggtgagccccacaaagctgaacgacctctgcttcaccaacgtctacgcggatagcttcgtgatccgcggcgacgaggtgaggcagatcgcacctggtcagacgggcaacatcgccgactataattacaagctgcctgatgatttcacgggatgtgtcatcgcttggaacagcaacaagttggactccaaggtgagcgggaactataactacctgtaccgcttatttcggaagtccaacttgaagccgttcgagcgagacatatccacggagatctatcaggcaggcaataagccctgcaacggggtggcagggttcaattgttactttcccctgaggtcgtactctttccggcccacatacggggtggggcaccagccttacagggtggtggtgctatccttcgagttgctgcacgccccagccaccgtatgtgggccgaagaagagtacgaacctcgtgaagaacaagtgcgtcaacttcaacttcaacgggttgaaggggacgggcgtgctcacggagagtaacaagaaattcctgccattccagcagttcgggcgtgatatcgctgacaccaccgacgcggtgcgggatccccagaccctggagatcctggacatcacgccgtgcagcttcggtggtgtcagcgtgatcacgcccggcaccaacacctcgaaccaggtggcagtgctttaccagggtgtgaactgcactgaggtgcctgtggctatccacgccgatcagctgaccccaacgtggagggtgtactcgacagggagcaacgtcttccagacccgcgctggctgcctgattggcgctgagtacgtgaacaactcgtacgagtgcgacatccccattggggccggcatctgcgcgagttaccagacccagaccaagagccatcggagggcgagatcggtggcatcccagtcgatcatcgcctacacgatgagcctgggggccgagaacagcgtggcctacagcaacaacagcatcgctatccccacaaactttacaatcagtgtgaccaccgagatcttgcccgtcagcatgaccaagacctcggtggactgcactatgtacatctgtggggatagcaccgagtgttccaacctgctcctccagtacggctcgttctgcacgcaactgaagcgtgcattgacgggcatcgcggtggagcaggacaagaacactcaggaggtgtttgctcaggtcaagcagatctacaagacgcccccgatcaagtacttcgggggcttcaacttctcccagatcctgccggacccgagcaagccctccaagaggtccttcatcgaggacctcttgttcaacaaggtgactctcgcggatgccggcttcatcaaacagtatggggactgcctgggtgacatcgccgccagggacctgatctgcgcgcagaagttcaaggggctgacagtgctgcccccgctcctgacggacgagatgatcgctcagtacacgtccgcgctgttggcggggacgattacgagcggctggacgttcggagcgggggcagcactgcagatccctttcgcgatgcagatggcctacaggttcaatggcatcggtgtcacccagaacgtactctacgagaatcagaagctcatcgccaatcagttcaacagcgcgatcgggaagatccaggactccctgtcgagtacagcctccgcgttggggaagctgcaggacgtggttaaccacaacgcccaggccctgaacaccctggtgaagcagctgtcatccaagttcggggccatcagttcggtgctgaacgacatcttcagtcggctggaccccccggaggcggaggtccagatagatcgcctcatcaccgggcgcctccagagtttgcagacgtacgtgactcagcagctcatacgggctgctgagatacgtgcgtctgcaaacctggcggcgaccaagatgagcgagtgtgtacttggtcagagcaagcgggtcgacttctgcgggaagggctatcacctgatgtccttcccgcagagcgccccccacggggtggtcttcctgcacgtgacgtatgtgccggcgcaggagaagaacttcaccactgcgccggccatatgtcacgacgggaaggcccacttcccccgggagggcgtgttcgtgtcgaatgggacgcactggttcgtcacccagcggaacttctatgaaccacagataatcaccactgacaacaccttcgtcagtgggaactgcgatgtggtcataggaatcgtcaacaacacggtgtacgacccccttcagcccgagctggactcgttcaaggaggagctggacaaatacttcaagaaccacacgagcccggatgttgacctcggggacattagcggaatcaatgcctccgtggtcaacatccaaaaggagatcgacaggctcaacgaggtggccaagaacctcaacgagagcctgatcgatctccaggagctcggcaagtacgagcagtacatcaagtggccgtggtacatatggctggggttcatcgcagggctgatcgcgatcgtgatggtcacgatcatgctctgctgcatgacctcgtgctgctcgtgcttgaagggctgctgctcgtgtggttcttgctgcaagttcgacgaggacgattccgagccggtgctgaagggggtcaaactgcactacacctgataatctagagccgccgctccagctttgcacgtttcgatcccaaaggccctttttagggccgaccattcattgcaaaaaaaaaaaaaaaaaaaaaaaaaaaaaagcatatgactaaaaaaaaaaaaaaaaaaaaaaaaaaaaaaaaaaaaaaaaaaaaaaaaaaaaaaaaaaaaaaaaaaaaaaaaaaaaaaaaaaaaaaaagaagagcgtttaaacacgtgatatctggcctcatgggccttcctttcactgcccgctttccagtcgggaaacctgtcgtgccagctgcattaacatggtcatagctgtttccttgcgtattgggcgctctccgcttcctcgctcactgactcgctgcgctcggtcgttcgggtaaagcctggggtgcctaatgagcaaaaggccagcaaaaggccaggaaccgtaaaaaggccgcgttgctggcgtttttccataggctccgcccccctgacgagcatcacaaaaatcgacgctcaagtcagaggtggcgaaacccgacaggactataaagataccaggcgtttccccctggaagctccctcgtgcgctctcctgttccgaccctgccgcttaccggatacctgtccgcctttctcccttcgggaagcgtggcgctttctcatagctcacgctgtaggtatctcagttcggtgtaggtcgttcgctccaagctgggctgtgtgcacgaaccccccgttcagcccgaccgctgcgccttatccggtaactatcgtcttgagtccaacccggtaagacacgacttatcgccactggcagcagccactggtaacaggattagcagagcgaggtatgtaggcggtgctacagagttcttgaagtggtggcctaactacggctacactagaagaacagtatttggtatctgcgctctgctgaagccagttaccttcggaaaaagagttggtagctcttgatccggcaaacaaaccaccgctggtagcggtggtttttttgtttgcaagcagcagattacgcgcagaaaaaaaggatctcaagaagatcctttgatcttttctacggggtctgacgctcagtggaacgaaaactcacgttaagggattttggtcatgaatacacggtgcctgactgcgttagcaatttaactgtgataaactaccgcattaaagcttatcgatgataagctgtcaaacatgagaattcttagaaaaactcatcgagcatcaaatgaaactgcaatttattcatatcaggattatcaataccatatttttgaaaaagccgtttctgtaatgaaggagaaaactcaccgaggcagttccataggatggcaagatcctggtatcggtctgcgattccgactcgtccaacatcaatacaacctattaatttcccctcgtcaaaaataaggttatcaagtgagaaatcaccatgagtgacgactgaatccggtgagaatggcaaaagcttatgcatttctttccagacttgttcaacaggccagccattacgctcgtcatcaaaatcactcgcatcaaccaaaccgttattcattcgtgattgcgcctgagcgagacgaaatacgcgatcgctgttaaaaggacaattacaaacaggaatcgaatgcaaccggcgcaggaacactgccagcgcatcaacaatattttcacctgaatcaggatattcttctaatacctggaatgctgttttcccggggatcgcagtggtgagtaaccatgcatcatcaggagtacggataaaatgcttgatggtcggaagaggcataaattccgtcagccagtttagtctgaccatctcatctgtaacatcattggcaacgctacctttgccatgtttcagaaacaactctggcgcatcgggcttcccatacaatcgatagattgtcgcacctgattgcccgacattatcgcgagcccatttatacccatataaatcagcatccatgttggaatttaatcgcggcctcgagcaagacgtttcccgttgaatatggctcataacaccccttgtattactgtttatgtaagcagacagttttattgttcatgagcggatacatatttgaatgtatttagaaaaataaacaaataggggttccgcgcacatttccccgaaaagtgccacctaaattgtaagcgttaatattttgttaaaattcgcgttaaatttttgttaaatcagctcattttttaaccaataggccgaaatcggcaaaatcccttataaatcaaaagaatagaccgagatagggttgagtggccgctacagggcgctcccattcgccattcaggctgcgcaactgttgggaagggcgtttcggtgcgggcctcttcgctattacgccagctggcgaaagggggatgtgctgcaaggcgattaagttgggtaacgccagggttttcccagtcac

SEQ ID NO: 203 - DNA, 6474 bp, synthetic construct
  source 1..6474: mol_type = other DNA
acgcgtgcctaaattaatacgactcactataaggagttccctatcactctctttaatcactactcacagtaacctcaactcctgccacaatgttcgtgtttctggtgctgctgcctctggtgagcagccagtgcgtgaacctgaccacacgcacccagctgccaccggcttacaccaacagcttcacccgcggggtgtactaccccgacaaggtgttcaggtccagtgtgctgcacagcacacaggacctgttcctgcccttcttcagcaacgtgacttggttccatgtgatcagcggcaccaatgggaccaagcgcttcgacaaccccgtgctgccattcaatgacggcgtgtacttcgccagcatcgagaagagtaacatcatcaggggctggatcttcggcaccaccctcgacagcaagacccagtctctgctgatcgtgaacaacgccacgaacgtggtgattaaggtgtgcgagttccagttctgtaatgatcccttcctggatcacaagaataataaatcctggatggagtccgagttcagggtgtactccagcgccaacaattgcaccttcgagtacgtgtcccagcccttcctgatggacctggagggcaagcaggggaacttcaagaatctgagagagttcgtgttcaagaacatcgatggatacttcaagatctactcgaagcacacccccatcatcgtgagggagccagaggacctgccccaggggttcagcgctctggagccactggtggacctgccaatcgggattaatatcaccaggttccagaccctgctggctctgcaccggagctacctgacccctggggacagctcctctggctggaccgccggggctgcggcctactacgtgggctacctgcagccccggacattcctgctgaagtacaacgagaatgggaccatcacggacgctgtggactgcgcgctggaccctctgtccgagaccaagtgtacactgaagagtttcaccgtggagaaggggatctaccagacctccaacttcagggtgcagccgaccgagagcattgtgcgcttcccaaatatcaccaacctgtgccccttcgacgaggtgttcaatgccactcggttcgcttcagtgtacgcttggaatcggaagaggatctccaactgcgtggcggactacagcgtcctgtacaacctggccccattcttcaccttcaagtgctacggggtgtcccccacaaagctgaacgacctgtgcttcactaatgtgtacgcggacagctttgtgatccgcggcgatgaggtgcggcagattgcccccggccagactgggaacatcgccgactacaactacaagctgccagacgacttcaccggctgcgtgatcgcctggaacagcaacaagctggactccaaggtgtctggcaactataactacctgtatcggctgttccggaagagtaacctgaagcccttcgagcgggacatctccaccgagatctaccaggctggaaataagccatgcaacggcgtggcgggcttcaattgctacttccccctgcgctcttacagcttcaggcccacatacggggtggggcaccagccctacagggtggtggtgctgagcttcgagctcctgcacgcccccgccaccgtgtgtgggccgaagaagagtacaaacctggtgaagaacaagtgcgtgaacttcaacttcaacgggctgaaagggacaggagtgctgacagagtccaacaagaaattcctgccctttcagcagtttggacgggacatcgccgacaccaccgacgccgtgagggatccccagaccctggagatcctggacatcacaccctgtagcttcgggggggtgtctgtgatcacgcctgggacaaacacctccaaccaggtggctgtgctgtaccagggcgtgaattgcactgaggtgccagtggcgattcacgccgaccagctgacacccacctggcgggtgtactctaccggctccaatgtgttccagaccagggccggctgcctgatcggggctgagtacgtgaacaacagctacgaatgcgacatccccatcggggccggcatttgtgccagctaccagacacagaccaagtcccacaggcgggcccggagcgtggcctcccagagcatcatcgcctacacaatgagcctgggggccgagaactccgtggcctacagcaacaactccatcgctatccccacaaacttcacaatcagcgtgaccacagagatcctgcctgtctctatgaccaagacctctgtggactgcaccatgtacatctgtggggatagcaccgagtgcagcaacctgctgctgcagtacggcagcttctgcactcagctgaagcgggccctgactgggatcgccgtggagcaggacaagaatacccaggaggtgtttgcccaggtgaagcagatctacaagacaccccccatcaagtacttcggcgggttcaacttctctcagattctgccagaccccagcaagccctccaagcggtccttcattgaggacctgctgtttaacaaggtgaccctggccgacgccgggttcatcaagcagtacggggactgcctgggcgacatcgccgcccgcgacctcatctgtgcgcagaagtttaaggggctgaccgtgctgccccccctgctgacagatgagatgatcgcccagtacacctccgcgctgctggctgggaccatcacctcggggtggacttttggcgctggagccgcgctgcagatccccttcgccatgcagatggcctatcggttcaacgggatcggggtgacacagaacgtgctgtacgagaaccagaagctgatcgccaatcagtttaacagcgccatcgggaagattcaggacagcctgagctccacagcttccgccctggggaagctgcaggatgtggtgaaccacaacgctcaggccctgaacaccctggtgaagcagctgagctccaagtttggggccatctccagcgtgctgaacgacatcttcagcaggctggacccacccgaggccgaggtccagatcgaccggctcatcacggggcggctgcagagcctgcagacctacgtgactcagcagctcatcagagctgctgagatcagggcttctgccaacctggccgccaccaagatgagcgagtgcgtgctgggccagagcaagcgggtggacttctgtgggaagggctaccacctgatgtccttcccacagagcgccccccacggggtggtgttcctgcacgtgacctacgtgcccgctcaggagaagaacttcaccaccgccccggccatttgccacgacggcaaggcccacttccccagggagggcgtgttcgtgtccaacgggacacactggttcgtgacacagcgcaacttctatgagccccagatcatcacaaccgacaacacattcgtgagcgggaactgcgacgtggtgatcgggatcgtgaacaacaccgtgtacgatcccctgcagcctgagctggactccttcaaggaagaactggacaagtacttcaagaaccacacctccccagacgtggatctgggggacatcagcggcatcaacgccagcgtggtgaacatccagaaggagatcgaccggctgaacgaggtggccaagaatctgaatgagtccctgatcgacctccaggagctggggaagtacgagcagtacatcaagtggccctggtacatctggctggggttcatcgccgggctgatcgccatcgtgatggtgaccatcatgctgtgctgcatgaccagctgctgcagctgcctgaaaggctgctgcagctgcgggtcgtgctgcaagttcgacgaggacgacagcgagcccgtgttgaaaggagtgaaactgcactacacctgataatctagattaagtgcttcccacttaaaacatatcaggccttctatttatttaaatatttaaattttatatttattgttgaatgtatggtttgctacctattgtaactattattcttaatcttaaaactataaatatggatcttttatgattctttttgtaagccctaggggctctaaaatggtttcacttatttatcccaaaatttcattgcaaaaaaaaaaaaaaaaaaaaaaaaaaaaaagcatatgactaaaaaaaaaaaaaaaaaaaaaaaaaaaaaaaaaaaaaaaaaaaaaaaaaaaaaaaaaaaaaaaaaaaaaaaaaaaaaaaaaaaaaaaagaagagcgtttaaacacgtgatatctggcctcatgggccttcctttcactgcccgctttccagtcgggaaacctgtcgtgccagctgcattaacatggtcatagctgtttccttgcgtattgggcgctctccgcttcctcgctcactgactcgctgcgctcggtcgttcgggtaaagcctggggtgcctaatgagcaaaaggccagcaaaaggccaggaaccgtaaaaaggccgcgttgctggcgtttttccataggctccgcccccctgacgagcatcacaaaaatcgacgctcaagtcagaggtggcgaaacccgacaggactataaagataccaggcgtttccccctggaagctccctcgtgcgctctcctgttccgaccctgccgcttaccggatacctgtccgcctttctcccttcgggaagcgtggcgctttctcatagctcacgctgtaggtatctcagttcggtgtaggtcgttcgctccaagctgggctgtgtgcacgaaccccccgttcagcccgaccgctgcgccttatccggtaactatcgtcttgagtccaacccggtaagacacgacttatcgccactggcagcagccactggtaacaggattagcagagcgaggtatgtaggcggtgctacagagttcttgaagtggtggcctaactacggctacactagaagaacagtatttggtatctgcgctctgctgaagccagttaccttcggaaaaagagttggtagctcttgatccggcaaacaaaccaccgctggtagcggtggtttttttgtttgcaagcagcagattacgcgcagaaaaaaaggatctcaagaagatcctttgatcttttctacggggtctgacgctcagtggaacgaaaactcacgttaagggattttggtcatgaatacacggtgcctgactgcgttagcaatttaactgtgataaactaccgcattaaagcttatcgatgataagctgtcaaacatgagaattcttagaaaaactcatcgagcatcaaatgaaactgcaatttattcatatcaggattatcaataccatatttttgaaaaagccgtttctgtaatgaaggagaaaactcaccgaggcagttccataggatggcaagatcctggtatcggtctgcgattccgactcgtccaacatcaatacaacctattaatttcccctcgtcaaaaataaggttatcaagtgagaaatcaccatgagtgacgactgaatccggtgagaatggcaaaagcttatgcatttctttccagacttgttcaacaggccagccattacgctcgtcatcaaaatcactcgcatcaaccaaaccgttattcattcgtgattgcgcctgagcgagacgaaatacgcgatcgctgttaaaaggacaattacaaacaggaatcgaatgcaaccggcgcaggaacactgccagcgcatcaacaatattttcacctgaatcaggatattcttctaatacctggaatgctgttttcccggggatcgcagtggtgagtaaccatgcatcatcaggagtacggataaaatgcttgatggtcggaagaggcataaattccgtcagccagtttagtctgaccatctcatctgtaacatcattggcaacgctacctttgccatgtttcagaaacaactctggcgcatcgggcttcccatacaatcgatagattgtcgcacctgattgcccgacattatcgcgagcccatttatacccatataaatcagcatccatgttggaatttaatcgcggcctcgagcaagacgtttcccgttgaatatggctcataacaccccttgtattactgtttatgtaagcagacagttttattgttcatgagcggatacatatttgaatgtatttagaaaaataaacaaataggggttccgcgcacatttccccgaaaagtgccacctaaattgtaagcgttaatattttgttaaaattcgcgttaaatttttgttaaatcagctcattttttaaccaataggccgaaatcggcaaaatcccttataaatcaaaagaatagaccgagatagggttgagtggccgctacagggcgctcccattcgccattcaggctgcgcaactgttgggaagggcgtttcggtgcgggcctcttcgctattacgccagctggcgaaagggggatgtgctgcaaggcgattaagttgggtaacgccagggttttcccagtcac

SEQ ID NO: 204 - DNA, 6474 bp, synthetic construct
  source 1..6474: mol_type = other DNA
acgcgtgcctaaattaatacgactcactataaggagttccctatcactctctttaatcactactcacagtaacctcaactcctgccacaatgttcgtgttcctggtgctgctccccctggtcagctcacagtgcgtgaacctgaccactcgcacacagctgcccccagcttacactaactccttcacccgcggggtgtactaccccgacaaggtgttcaggagtagtgtgctgcacagcacccaggacctctttctcccattcttctccaacgtcacgtggttccacgtgatcagcgggacaaatgggacaaagaggttcgacaaccctgtgctgcccttcaacgatggggtgtacttcgcctccatcgagaagagtaacatcatcaggggctggatctttgggaccaccctggactcaaagacccagtccctgctgatcgtgaacaacgccaccaatgtggtcatcaaggtgtgcgagttccagttctgcaacgatccattcctggatcacaaaaacaacaagagctggatggagagtgagttccgggtgtacagcagcgcgaacaactgcacgttcgaatacgtgtcacagccattcctgatggacctggaggggaagcagggcaattttaagaacctgcgcgagttcgtcttcaagaacatcgacgggtattttaagatctactccaagcacacacccatcatcgtcagggagcccgaggatctgccccagggcttctctgccctggagccgctggtggacctccccataggaattaacatcaccaggttccagacactcctggccctgcacaggagctacctgacacctggtgacagttccagtgggtggacggccggggctgcagcctactacgtgggctacctgcagccccggaccttcctgctgaagtacaacgagaatgggaccattacagacgctgtggactgcgcactggatcctctgtccgagaccaagtgtacactgaagagtttcaccgtggagaaggggatctaccagacctccaacttcagggtgcagccgaccgagagcattgtgcgcttcccaaatatcacaaacctgtgccccttcgacgaggtgttcaatgctactcggttcgcttcagtgtacgcttggaatcggaagaggatcagcaactgcgtggcagactacagcgtcctgtacaacctggccccattcttcacattcaagtgctacggcgtctcccccacgaagctgaatgacctgtgcttcaccaacgtgtacgcagacagcttcgtgatccggggagacgaggtccgccagatcgctccagggcagaccggcaacatcgccgactacaactacaagctccctgacgacttcaccgggtgtgtgatcgcttggaacagcaacaagctggacagcaaggtgtccggcaactacaactacctgtaccgcctgtttcgcaagtccaacctgaagcccttcgagcgggatatctccacagagatctaccaggctggcaacaagccctgcaacggcgtggcgggcttcaactgctacttcccactgaggtcttactccttcaggcccacatacggggtggggcaccagccctaccgcgtggtggtgctcagctttgagctcctccacgcccccgccaccgtgtgtgggcccaagaagagtaccaacctggtgaagaacaagtgcgtgaacttcaacttcaacgggctcaaggggaccggcgtcctcaccgagtccaacaagaagttcctgcccttccagcagtttggcagagacatcgccgacactacagacgcggtccgggatccccagaccctggagatcctggacatcacgccctgtagcttcggcggtgtctctgtcatcactcccggtaccaacacatccaaccaggtggcggtgctgtaccagggcgtgaattgcactgaggtgccagtggcaattcacgccgatcagctgacacccacctggcgggtgtacagtaccgggagcaacgtgttccagacacgggcaggatgtctgatcggcgctgagtacgtgaacaacagctacgagtgcgacatccccattggagcgggcatctgcgccagctaccagacccagactaagagccacaggcgggcccgctctgtggcctcacagagcatcatcgcctacactatgagtctgggggctgagaacagcgtggcctactccaacaacagcatcgcaatcccaaccaacttcacaatcagcgtcaccacggagatcctgcccgtgtctatgaccaagacctcagtggactgcacaatgtacatctgcggggacagcaccgagtgttccaacctcctgctccagtacggcagtttctgtacacagctcaaaagggccctgacaggtatagccgtggagcaggacaagaacactcaggaggtgttcgcgcaggtgaagcagatctacaagactcctcccatcaagtactttggagggtttaacttcagccagatcctgcctgaccccagcaaaccctccaagaggagcttcatcgaggatctgctctttaacaaagtcaccctcgccgacgcagggttcattaagcagtacggtgactgtctgggagatatcgccgctcgggatctcatctgtgcgcagaagttcaagggactgaccgtcctgccacccctgctcacggatgagatgatcgcccagtacaccagcgccctgctggctgggacgatcacttcaggttggactttcggggcaggcgccgccctgcagatccccttcgccatgcagatggcctacaggttcaacgggatcggcgtgacacagaatgtgctgtacgagaatcagaagctgatcgccaaccagttcaacagcgcgatcggcaagatccaggactcactctccagcaccgcaagcgccctggggaagctccaggacgtggtcaaccacaacgcacaggctctgaacaccctcgtcaagcagctgagcagcaagttcggcgccatctcttctgtgctgaatgacatcttcagccggctggatcccccagaggctgaggtccagatcgaccggctgatcactggtcggctgcagagtctgcagacctacgtgactcagcagctgatcagggcagccgagatccgggcctcagccaacctggccgccacgaagatgtcagagtgcgtgctgggccagtccaagagggtggacttctgtgggaagggctaccacctgatgtccttcccacagagcgcccctcacggagtggtgttcctgcacgtcacctacgtgccagcacaggagaagaacttcacaacagctcccgcaatctgccacgacgggaaggcccacttcccccgggagggggtcttcgtgtcaaacggcacccactggttcgtgacacagcgcaacttctacgagccacagatcatcaccactgacaacaccttcgtcagtgggaactgtgacgtggtgatcggcatcgtcaacaacaccgtgtacgacccccttcaacccgaactggatagcttcaaggaggagctggacaagtacttcaagaaccacacctccccagacgtggacctgggcgacattagcggcatcaacgctagtgtcgtcaacatccagaaggagatcgacaggctcaacgaggtggccaaaaacctcaacgagagcctgatcgatctccaggagctggggaagtacgagcagtacatcaagtggccttggtacatctggctcgggttcatcgcagggctgatcgccatcgtgatggtgacaatcatgctgtgctgcatgaccagctgctgcagctgcctgaagggctgctgcagctgcgggagctgttgcaagttcgacgaggacgactcagagcctgtgctcaagggggtgaagctgcactatacttgataatctagattaagtgcttcccacttaaaacatatcaggccttctatttatttaaatatttaaattttatatttattgttgaatgtatggtttgctacctattgtaactattattcttaatcttaaaactataaatatggatcttttatgattctttttgtaagccctaggggctctaaaatggtttcacttatttatcccaaaatttcattgcaaaaaaaaaaaaaaaaaaaaaaaaaaaaaagcatatgactaaaaaaaaaaaaaaaaaaaaaaaaaaaaaaaaaaaaaaaaaaaaaaaaaaaaaaaaaaaaaaaaaaaaaaaaaaaaaaaaaaaaaaaagaagagcgtttaaacacgtgatatctggcctcatgggccttcctttcactgcccgctttccagtcgggaaacctgtcgtgccagctgcattaacatggtcatagctgtttccttgcgtattgggcgctctccgcttcctcgctcactgactcgctgcgctcggtcgttcgggtaaagcctggggtgcctaatgagcaaaaggccagcaaaaggccaggaaccgtaaaaaggccgcgttgctggcgtttttccataggctccgcccccctgacgagcatcacaaaaatcgacgctcaagtcagaggtggcgaaacccgacaggactataaagataccaggcgtttccccctggaagctccctcgtgcgctctcctgttccgaccctgccgcttaccggatacctgtccgcctttctcccttcgggaagcgtggcgctttctcatagctcacgctgtaggtatctcagttcggtgtaggtcgttcgctccaagctgggctgtgtgcacgaaccccccgttcagcccgaccgctgcgccttatccggtaactatcgtcttgagtccaacccggtaagacacgacttatcgccactggcagcagccactggtaacaggattagcagagcgaggtatgtaggcggtgctacagagttcttgaagtggtggcctaactacggctacactagaagaacagtatttggtatctgcgctctgctgaagccagttaccttcggaaaaagagttggtagctcttgatccggcaaacaaaccaccgctggtagcggtggtttttttgtttgcaagcagcagattacgcgcagaaaaaaaggatctcaagaagatcctttgatcttttctacggggtctgacgctcagtggaacgaaaactcacgttaagggattttggtcatgaatacacggtgcctgactgcgttagcaatttaactgtgataaactaccgcattaaagcttatcgatgataagctgtcaaacatgagaattcttagaaaaactcatcgagcatcaaatgaaactgcaatttattcatatcaggattatcaataccatatttttgaaaaagccgtttctgtaatgaaggagaaaactcaccgaggcagttccataggatggcaagatcctggtatcggtctgcgattccgactcgtccaacatcaatacaacctattaatttcccctcgtcaaaaataaggttatcaagtgagaaatcaccatgagtgacgactgaatccggtgagaatggcaaaagcttatgcatttctttccagacttgttcaacaggccagccattacgctcgtcatcaaaatcactcgcatcaaccaaaccgttattcattcgtgattgcgcctgagcgagacgaaatacgcgatcgctgttaaaaggacaattacaaacaggaatcgaatgcaaccggcgcaggaacactgccagcgcatcaacaatattttcacctgaatcaggatattcttctaatacctggaatgctgttttcccggggatcgcagtggtgagtaaccatgcatcatcaggagtacggataaaatgcttgatggtcggaagaggcataaattccgtcagccagtttagtctgaccatctcatctgtaacatcattggcaacgctacctttgccatgtttcagaaacaactctggcgcatcgggcttcccatacaatcgatagattgtcgcacctgattgcccgacattatcgcgagcccatttatacccatataaatcagcatccatgttggaatttaatcgcggcctcgagcaagacgtttcccgttgaatatggctcataacaccccttgtattactgtttatgtaagcagacagttttattgttcatgagcggatacatatttgaatgtatttagaaaaataaacaaataggggttccgcgcacatttccccgaaaagtgccacctaaattgtaagcgttaatattttgttaaaattcgcgttaaatttttgttaaatcagctcattttttaaccaataggccgaaatcggcaaaatcccttataaatcaaaagaatagaccgagatagggttgagtggccgctacagggcgctcccattcgccattcaggctgcgcaactgttgggaagggcgtttcggtgcgggcctcttcgctattacgccagctggcgaaagggggatgtgctgcaaggcgattaagttgggtaacgccagggttttcccagtcac

SEQ ID NO: 205 - DNA, 6474 bp, synthetic construct
  source 1..6474: mol_type = other DNA
acgcgtgcctaaattaatacgactcactataaggagttccctatcactctctttaatcactactcacagtaacctcaactcctgccacaatgttcgtgttcctggtgctgcttccgctggtcagcagccagtgcgtgaacctgaccacgcggacgcagctgccacccgcgtacaccaatagcttcactcggggggtctactacccggacaaggtcttccggagcagcgtgctgcacagcacgcaggacctcttcctgccgttcttctcgaacgtcacgtggttccacgtgatcagcgggacgaacggcacgaagaggttcgacaaccccgtgctcccgttcaatgacggggtgtatttcgccagcatcgagaagagtaacatcattcgggggtggatcttcggcactaccttggactccaagacgcagagcctgctcatcgtgaacaacgccaccaacgtggtgatcaaggtctgcgagttccagttctgcaacgaccccttcttggaccacaagaacaacaagagctggatggagtccgagttcagagtctacagcagcgccaacaattgcaccttcgaatacgtgagccagccgttcctgatggacctggaaggcaagcagggcaacttcaagaacttgcgcgagtttgtcttcaagaacatcgacggctacttcaagatctacagcaagcacacccccatcattgtgcgggagccggaggacctgccgcagggcttcagcgctctggagccgctggtggacctgcccatcggcatcaacatcacgcggttccagacgctgttggccctgcacaggtcctacctgactccgggagactccagctccgggtggacggccggggctgcagcctactatgtgggctacctgcagccccggaccttcttgttgaagtacaacgagaacggcacgatcacggacgccgtggattgtgccttggaccccctgagcgagaccaagtgtaccctgaagtccttcaccgtggagaaggggatctaccagacctccaacttccgggtccagccgactgagagcatcgtgcggtttcccaacattaccaacttgtgccccttcgatgaggtgttcaacgccacgcggttcgccagcgtgtacgcctggaacaggaagcgcatcagcaactgcgtggccgactactcagtgttgtacaacctcgccccgttcttcaccttcaagtgctacggggtgagccctacaaagctgaacgacctctgcttcaccaacgtgtacgccgacagctttgtgattcgcggcgacgaggtccggcagatcgccccagggcagaccggcaatatcgctgactacaactacaagctgcctgacgatttcaccgggtgcgtgatcgcctggaacagcaacaagctggacagcaaggtgtcagggaactacaattacctgtaccggttgttcaggaagagtaacctgaagccgttcgagcgtgacatcagcaccgagatctaccaggccggcaacaagccctgcaacggggtggcgggattcaactgctactttccgttgcgctcctattcctttcggcccacctacggggtgggccaccagccctacagggtggtggtgctctccttcgagctgctccacgcaccggccacggtgtgtgggccgaagaagagtaccaacctggtgaagaataagtgcgtcaacttcaacttcaacgggctgaaaggaacaggagtgctgacggagagcaacaagaaattcctgccattccagcagttcgggcgcgacatcgctgacaccaccgacgctgtgcgggacccccagaccctggagatcctggacatcaccccttgcagcttcggcggcgtcagcgtgatcacgcccgggaccaacacatccaaccaggtggccgtgctgtaccagggcgtgaactgcaccgaggtgccggtggccatccacgccgatcagctgacgcccacctggcgggtgtactccacgggcagcaacgtcttccagacacgcgccggctgcttgatcggagccgagtacgtcaataacagctacgagtgcgacattcccatcggggccgggatctgcgccagctaccagacgcagaccaagtcccaccggcgcgctcggagcgtggcctcccagagcatcatcgcctacacgatgagcctgggggccgagaacagcgtcgcttatagcaacaacagcatcgctatccccaccaactttacaattagcgtgaccacggagatcttgcccgtcagcatgaccaagacctccgtggactgcaccatgtacatctgcggggatagcaccgagtgctccaacctgctcctgcagtacgggtccttctgcacgcagttgaagcgcgcattgaccggcatcgcagtggagcaggacaagaacacgcaggaggtgtttgctcaggtcaagcagatctacaagacgcccccgatcaagtacttcgggggcttcaacttcagccagatcctgcctgacccgagcaagccctccaagcgtagcttcatcgaggacctgctgttcaataaagtgacgctggcagacgccggcttcatcaagcagtacggcgactgtctgggggacatcgctgcccgggacctcatctgtgcccagaagttcaagggcctcacggtcctgccgcccctgctcacagatgagatgatcgcccagtacacgagcgccctgctcgctgggaccatcaccagcgggtggacgttcggcgcgggcgctgcattacagatccccttcgcgatgcagatggcctacagatttaacggtatcggcgtcacgcagaacgtgctgtacgagaaccagaagctgatcgccaaccagttcaacagcgccatcgggaagatccaggacagcttgagcagcaccgcctctgccctggggaagctgcaggacgtcgtgaatcacaatgcccaggccttgaacacgttggtgaagcagctctcatcgaagttcggcgccatcagcagcgtgctgaacgacatcttcagtcggctggaccccccggaggcggaggtccagatcgaccgcctgatcacggggaggctgcagagcttgcagacgtacgtgactcagcagctcatcagggctgctgagatccgggcgtctgccaacctggctgccaccaagatgtccgaatgcgtcttggggcagtccaagcgggtggacttctgcgggaagggctaccacctgatgtccttcccgcagagcgcaccccacggggtggtgttcctgcacgtcacctacgtgccggctcaggagaagaacttcaccacagctcccgcaatctgccacgacgggaaggcccacttcccccgggaaggggtcttcgtgtcgaacggcacccactggttcgtcacgcagcgcaacttctacgagccacagatcatcaccactgacaacaccttcgtcagtgggaactgcgacgtggtcatcgggatcgtcaacaacacggtgtacgatcccctgcagcccgagctggatagcttcaaggaggagctggacaagtacttcaagaaccacacttccccggatgtggacctcggggacatcagcggaatcaacgcctccgtggtcaacatccagaaggagatcgacaggctcaacgaggtggcaaagaacctcaacgagagcctgatcgatctccaggagctggggaagtatgagcagtacatcaagtggccctggtacatctggctcgggttcatcgcagggttgatcgccatcgtgatggtgacgatcatgttgtgctgcatgacgagctgctgcagctgcctgaagggctgctgcagctgcgggagctgctgtaagttcgacgaggacgattccgagccggtgctgaagggcgtgaagctgcactacacctgataatctagattaagtgcttcccacttaaaacatatcaggccttctatttatttaaatatttaaattttatatttattgttgaatgtatggtttgctacctattgtaactattattcttaatcttaaaactataaatatggatcttttatgattctttttgtaagccctaggggctctaaaatggtttcacttatttatcccaaaatttcattgcaaaaaaaaaaaaaaaaaaaaaaaaaaaaaagcatatgactaaaaaaaaaaaaaaaaaaaaaaaaaaaaaaaaaaaaaaaaaaaaaaaaaaaaaaaaaaaaaaaaaaaaaaaaaaaaaaaaaaaaaaaagaagagcgtttaaacacgtgatatctggcctcatgggccttcctttcactgcccgctttccagtcgggaaacctgtcgtgccagctgcattaacatggtcatagctgtttccttgcgtattgggcgctctccgcttcctcgctcactgactcgctgcgctcggtcgttcgggtaaagcctggggtgcctaatgagcaaaaggccagcaaaaggccaggaaccgtaaaaaggccgcgttgctggcgtttttccataggctccgcccccctgacgagcatcacaaaaatcgacgctcaagtcagaggtggcgaaacccgacaggactataaagataccaggcgtttccccctggaagctccctcgtgcgctctcctgttccgaccctgccgcttaccggatacctgtccgcctttctcccttcgggaagcgtggcgctttctcatagctcacgctgtaggtatctcagttcggtgtaggtcgttcgctccaagctgggctgtgtgcacgaaccccccgttcagcccgaccgctgcgccttatccggtaactatcgtcttgagtccaacccggtaagacacgacttatcgccactggcagcagccactggtaacaggattagcagagcgaggtatgtaggcggtgctacagagttcttgaagtggtggcctaactacggctacactagaagaacagtatttggtatctgcgctctgctgaagccagttaccttcggaaaaagagttggtagctcttgatccggcaaacaaaccaccgctggtagcggtggtttttttgtttgcaagcagcagattacgcgcagaaaaaaaggatctcaagaagatcctttgatcttttctacggggtctgacgctcagtggaacgaaaactcacgttaagggattttggtcatgaatacacggtgcctgactgcgttagcaatttaactgtgataaactaccgcattaaagcttatcgatgataagctgtcaaacatgagaattcttagaaaaactcatcgagcatcaaatgaaactgcaatttattcatatcaggattatcaataccatatttttgaaaaagccgtttctgtaatgaaggagaaaactcaccgaggcagttccataggatggcaagatcctggtatcggtctgcgattccgactcgtccaacatcaatacaacctattaatttcccctcgtcaaaaataaggttatcaagtgagaaatcaccatgagtgacgactgaatccggtgagaatggcaaaagcttatgcatttctttccagacttgttcaacaggccagccattacgctcgtcatcaaaatcactcgcatcaaccaaaccgttattcattcgtgattgcgcctgagcgagacgaaatacgcgatcgctgttaaaaggacaattacaaacaggaatcgaatgcaaccggcgcaggaacactgccagcgcatcaacaatattttcacctgaatcaggatattcttctaatacctggaatgctgttttcccggggatcgcagtggtgagtaaccatgcatcatcaggagtacggataaaatgcttgatggtcggaagaggcataaattccgtcagccagtttagtctgaccatctcatctgtaacatcattggcaacgctacctttgccatgtttcagaaacaactctggcgcatcgggcttcccatacaatcgatagattgtcgcacctgattgcccgacattatcgcgagcccatttatacccatataaatcagcatccatgttggaatttaatcgcggcctcgagcaagacgtttcccgttgaatatggctcataacaccccttgtattactgtttatgtaagcagacagttttattgttcatgagcggatacatatttgaatgtatttagaaaaataaacaaataggggttccgcgcacatttccccgaaaagtgccacctaaattgtaagcgttaatattttgttaaaattcgcgttaaatttttgttaaatcagctcattttttaaccaataggccgaaatcggcaaaatcccttataaatcaaaagaatagaccgagatagggttgagtggccgctacagggcgctcccattcgccattcaggctgcgcaactgttgggaagggcgtttcggtgcgggcctcttcgctattacgccagctggcgaaagggggatgtgctgcaaggcgattaagttgggtaacgccagggttttcccagtcac

SEQ ID NO: 206 - DNA, 6474 bp, synthetic construct
  source 1..6474: mol_type = other DNA
acgcgtgcctaaattaatacgactcactataaggagttccctatcactctctttaatcactactcacagtaacctcaactcctgccacaatgttcgtgttcctggtgctgctgccgctggtcagttcgcagtgcgtgaacctgaccacgcggacgcagctgccacccgcgtacactaacagtttcactcggggggtctactacccggataaggtcttccggagtagcgtgctgcacagcacgcaggacctcttcctcccgttcttctcgaatgtcacgtggttccacgtgatcagcgggacgaacgggacgaagaggttcgacaaccccgtgctcccgttcaatgatggggtgtacttcgccagcatcgagaagagtaacatcattcgagggtggatctttggcactaccctggactccaagactcagagtctgctcatagtcaacaatgccaccaacgtggtgatcaaggtctgtgagttccagttctgcaacgatccattcctggatcacaagaataacaagagctggatggagtctgagttcagagtctatagtagtgccaacaactgcaccttcgagtatgtgagccagccgttcctgatggaccttgaaggcaagcagggcaacttcaagaacctgcgcgagtttgtcttcaagaacatcgacggctacttcaagatatacagcaagcacacccccatcattgtgcgggagccggaggacctgccgcagggcttcagcgctctggagccgctggtggatttgccgatcggcatcaacatcacgcggttccagacgctgttggccctgcacaggtcctacctgactccgggggactccagctccgggtggacggccggggctgcagcctactacgtgggctacttgcagccccggaccttcttgttgaagtacaacgagaacggcacaatcacggacgccgtggattgtgccctggaccccctgagtgagaccaagtgtaccctgaagtccttcaccgtggagaaggggatctatcagacctccaacttccgggtccagccgactgagagcatcgtgcggttccccaacatcacgaacttgtgcccctttgatgaggtgttcaacgccacgcggttcgcgagcgtgtacgcctggaacaggaagcgcatcagcaactgcgtggcagattattcagtgttgtacaacctcgccccgttcttcaccttcaagtgctacggggtgagccccacaaaactgaatgatctctgcttcaccaacgtgtacgccgatagctttgtgattcgcggcgacgaagtccggcagatcgccccagggcagaccggcaacatcgccgactacaactacaagctgcctgacgattttaccggttgcgtgattgcctggaacagcaacaagctggactcgaaggtgtcagggaactacaactacctgtaccggttgttcagaaagagcaacctgaagccgttcgagcgtgacatcagcaccgagatctaccaggccggcaacaagccctgcaacggagtggcaggcttcaactgttactttccgttgcgctcctactcctttcggcccacctacggggtgggccaccagccctatagggtggtggtgctctccttcgagctgctccacgcgccggccacggtgtgtgggccgaagaagagtaccaacctggtgaagaacaagtgcgtcaacttcaacttcaacgggctgaagggaacaggggtgctgacggagagtaacaagaagttcctgccattccagcagttcgggcgtgacatcgctgacaccaccgacgctgtgcgggatccccagaccctcgagatcctggacatcaccccgtgcagcttcggtggtgtcagcgtgatcacgcccgggaccaacacctccaaccaggtggccgtgctgtaccagggcgtgaattgcaccgaggtgccggtggcaattcacgccgaccagctgacgcccacctggcgggtgtactccacgggcagcaacgtcttccagacccgcgccggctgcttgatcggggccgagtacgtgaacaacagctacgagtgcgatatcccgatcggggccgggatctgcgcctcctaccagacgcagaccaagtcccatcggcgcgctcgtagcgtggcctcccagagcatcatcgcctacacgatgagcctgggggccgagaactccgtcgcgtacagcaacaactccatcgctatccccacaaattttacaattagcgtgaccacggagatcttgcccgtcagcatgaccaagacctccgtggactgcaccatgtacatttgtggggatagcaccgagtgttccaacctgctcctgcagtacgggtccttctgcacgcagctgaagcgtgccctgaccggtattgcagtggagcaggacaagaacactcaggaggtgtttgctcaggtcaagcagatctacaagacgcccccgattaaatacttcgggggcttcaactttagccagatcctgcccgacccgagcaagccctccaagcggagcttcattgaggacctgctctttaacaaggtgacgctggcagacgccggcttcatcaagcagtacggcgactgtctgggggacatcgctgcccgggacctcatctgtgcccagaagttcaagggcctcacggtcctgccgcctctgctcacagatgagatgatcgcccagtacacgagcgctctgctcgctgggaccatcaccagcgggtggacgttcggtgctggggcggcattacagatcccctttgccatgcagatggcctacagattcaacgggattggtgtcacgcagaacgtgctgtacgagaaccagaagctgattgccaaccagttcaacagcgcaatcggtaagatccaggacagcttgagcagcaccgcctctgccctggggaagctgcaggacgtcgtgaatcacaacgcccaggccctgaacacgttggtgaagcagctctcatcaaagttcggcgcaatcagcagcgtgctgaacgacatcttcagtcggctggaccccccggaggctgaggtccagatagatcgcctcatcacgggaaggcttcagagtttgcagacgtacgtgactcagcagctcatccgggctgctgagatccgtgcgtctgcaaacctggctgccaccaagatgagcgagtgcgtcttggggcagtcaaagcgggtggacttctgcgggaagggctaccacctgatgtccttcccgcagagcgcaccccacggggtggtgttccttcacgtcacctacgtgccggctcaggagaagaacttcacaacagctcccgccatctgccacgacgggaaggcccacttcccccgggaaggggtcttcgtgtcgaatggcacccactggttcgtcacgcagcgcaacttctatgagccacagatcatcaccactgacaacaccttcgtcagtgggaactgcgatgtggtcatagggatcgtcaacaacacggtgtacgatcccctgcagcccgagctggatagcttcaaggaggagctggacaagtacttcaagaatcatacttccccggatgttgacctcggggacatcagcggcatcaacgcctccgtggtcaacatccagaaggagatcgacaggctcaacgaggtggcaaaaaacctcaacgagagcctgatcgatctccaggagctggggaagtatgagcagtacatcaagtggccttggtacatctggctcgggttcatcgcagggctgatcgccatcgtgatggtgacgatcatgttgtgctgcatgacgagctgctgcagctgcctgaagggctgctgcagctgcgggagctgttgcaagttcgacgaggacgactccgagccggtgctgaagggcgtgaagctgcactacacctgataatctagattaagtgcttcccacttaaaacatatcaggccttctatttatttaaatatttaaattttatatttattgttgaatgtatggtttgctacctattgtaactattattcttaatcttaaaactataaatatggatcttttatgattctttttgtaagccctaggggctctaaaatggtttcacttatttatcccaaaatttcattgcaaaaaaaaaaaaaaaaaaaaaaaaaaaaaagcatatgactaaaaaaaaaaaaaaaaaaaaaaaaaaaaaaaaaaaaaaaaaaaaaaaaaaaaaaaaaaaaaaaaaaaaaaaaaaaaaaaaaaaaaaaagaagagcgtttaaacacgtgatatctggcctcatgggccttcctttcactgcccgctttccagtcgggaaacctgtcgtgccagctgcattaacatggtcatagctgtttccttgcgtattgggcgctctccgcttcctcgctcactgactcgctgcgctcggtcgttcgggtaaagcctggggtgcctaatgagcaaaaggccagcaaaaggccaggaaccgtaaaaaggccgcgttgctggcgtttttccataggctccgcccccctgacgagcatcacaaaaatcgacgctcaagtcagaggtggcgaaacccgacaggactataaagataccaggcgtttccccctggaagctccctcgtgcgctctcctgttccgaccctgccgcttaccggatacctgtccgcctttctcccttcgggaagcgtggcgctttctcatagctcacgctgtaggtatctcagttcggtgtaggtcgttcgctccaagctgggctgtgtgcacgaaccccccgttcagcccgaccgctgcgccttatccggtaactatcgtcttgagtccaacccggtaagacacgacttatcgccactggcagcagccactggtaacaggattagcagagcgaggtatgtaggcggtgctacagagttcttgaagtggtggcctaactacggctacactagaagaacagtatttggtatctgcgctctgctgaagccagttaccttcggaaaaagagttggtagctcttgatccggcaaacaaaccaccgctggtagcggtggtttttttgtttgcaagcagcagattacgcgcagaaaaaaaggatctcaagaagatcctttgatcttttctacggggtctgacgctcagtggaacgaaaactcacgttaagggattttggtcatgaatacacggtgcctgactgcgttagcaatttaactgtgataaactaccgcattaaagcttatcgatgataagctgtcaaacatgagaattcttagaaaaactcatcgagcatcaaatgaaactgcaatttattcatatcaggattatcaataccatatttttgaaaaagccgtttctgtaatgaaggagaaaactcaccgaggcagttccataggatggcaagatcctggtatcggtctgcgattccgactcgtccaacatcaatacaacctattaatttcccctcgtcaaaaataaggttatcaagtgagaaatcaccatgagtgacgactgaatccggtgagaatggcaaaagcttatgcatttctttccagacttgttcaacaggccagccattacgctcgtcatcaaaatcactcgcatcaaccaaaccgttattcattcgtgattgcgcctgagcgagacgaaatacgcgatcgctgttaaaaggacaattacaaacaggaatcgaatgcaaccggcgcaggaacactgccagcgcatcaacaatattttcacctgaatcaggatattcttctaatacctggaatgctgttttcccggggatcgcagtggtgagtaaccatgcatcatcaggagtacggataaaatgcttgatggtcggaagaggcataaattccgtcagccagtttagtctgaccatctcatctgtaacatcattggcaacgctacctttgccatgtttcagaaacaactctggcgcatcgggcttcccatacaatcgatagattgtcgcacctgattgcccgacattatcgcgagcccatttatacccatataaatcagcatccatgttggaatttaatcgcggcctcgagcaagacgtttcccgttgaatatggctcataacaccccttgtattactgtttatgtaagcagacagttttattgttcatgagcggatacatatttgaatgtatttagaaaaataaacaaataggggttccgcgcacatttccccgaaaagtgccacctaaattgtaagcgttaatattttgttaaaattcgcgttaaatttttgttaaatcagctcattttttaaccaataggccgaaatcggcaaaatcccttataaatcaaaagaatagaccgagatagggttgagtggccgctacagggcgctcccattcgccattcaggctgcgcaactgttgggaagggcgtttcggtgcgggcctcttcgctattacgccagctggcgaaagggggatgtgctgcaaggcgattaagttgggtaacgccagggttttcccagtcac

SEQ ID NO: 207 - DNA, 6474 bp, synthetic construct
  source 1..6474: mol_type = other DNA
acgcgtgcctaaattaatacgactcactataaggagttccctatcactctctttaatcactactcacagtaacctcaactcctgccacaatgttcgtgttcctggtgttgttgccgctggtgtcgagccagtgcgtcaacctgacgacacggacacagctgccccccgcgtacacgaactcgttcacgcggggggtgtactacccagacaaggtcttcaggagcagcgtgctgcacagcacgcaggacctcttcctcccgttcttctccaatgtcacgtggttccacgtgatatcggggacgaacgggacgaagaggttcgacaaccccgtgctcccgttcaatgacggggtgtacttcgcgtcgatcgagaagagtaacatcattcgagggtggatttttggcactaccctggactcgaagactcagagcctgctcatagtcaacaacgccaccaacgtggtgatcaaggtctgtgagttccagttctgcaacgacccgttcttggaccacaagaacaacaagagctggatggagtctgagtttcgagtctacagtagtgccaacaattgcaccttcgaatatgtgagccagccgttcctgatggacctggagggcaagcagggcaacttcaagaacttgcgcgagtttgtcttcaagaacatcgacggctacttcaagatctactcgaagcacaccccgatcattgtgcgggagccggaggacctgccgcagggcttcagcgctctggaaccgctggtggacttgcccatcggcatcaacatcacgcggttccagacgctgctggccctgcacaggtcctacctgactccgggagactcttcgtcggggtggaccgcgggtgcagccgcctactacgtgggctacctgcagccgcggacgttcttgttgaagtacaacgagaacggcacaatcaccgacgcggtggattgtgccctcgacccgctgagcgagaccaagtgcacactcaagagcttcacggtggagaaggggatctatcagacctccaacttccgggtccagccgactgagagcatcgttcggttcccgaacatcaccaacctgtgcccgtttgacgaggtgttcaacgccacgcggttcgcgtccgtgtacgcctggaaccggaaacggatctcgaactgcgtggcggactactcagtgttgtacaacctcgccccgttcttcaccttcaagtgctacggggtgagccccacaaagctgaacgacctctgcttcaccaacgtctacgcggatagcttcgtgatccgcggcgacgaggtgaggcagatcgcacctggtcagacgggcaacatcgccgactataattacaagctgcctgatgatttcacgggatgtgtcatcgcttggaacagcaacaagttggactccaaggtgagcgggaactataactacctgtaccgcttatttcggaagtccaacttgaagccgttcgagcgagacatatccacggagatctatcaggcaggcaataagccctgcaacggggtggcagggttcaattgttactttcccctgaggtcgtactctttccggcccacatacggggtggggcaccagccttacagggtggtggtgctatccttcgagttgctgcacgccccagccaccgtatgtgggccgaagaagagtacgaacctcgtgaagaacaagtgcgtcaacttcaacttcaacgggttgaaggggacgggcgtgctcacggagagtaacaagaaattcctgccattccagcagttcgggcgtgatatcgctgacaccaccgacgcggtgcgggatccccagaccctggagatcctggacatcacgccgtgcagcttcggtggtgtcagcgtgatcacgcccggcaccaacacctcgaaccaggtggcagtgctttaccagggtgtgaactgcactgaggtgcctgtggctatccacgccgatcagctgaccccaacgtggagggtgtactcgacagggagcaacgtcttccagacccgcgctggctgcctgattggcgctgagtacgtgaacaactcgtacgagtgcgacatccccattggggccggcatctgcgcgagttaccagacccagaccaagagccatcggagggcgagatcggtggcatcccagtcgatcatcgcctacacgatgagcctgggggccgagaacagcgtggcctacagcaacaacagcatcgctatccccacaaactttacaatcagtgtgaccaccgagatcttgcccgtcagcatgaccaagacctcggtggactgcactatgtacatctgtggggatagcaccgagtgttccaacctgctcctccagtacggctcgttctgcacgcaactgaagcgtgcattgacgggcatcgcggtggagcaggacaagaacactcaggaggtgtttgctcaggtcaagcagatctacaagacgcccccgatcaagtacttcgggggcttcaacttctcccagatcctgccggacccgagcaagccctccaagaggtccttcatcgaggacctcttgttcaacaaggtgactctcgcggatgccggcttcatcaaacagtatggggactgcctgggtgacatcgccgccagggacctgatctgcgcgcagaagttcaaggggctgacagtgctgcccccgctcctgacggacgagatgatcgctcagtacacgtccgcgctgttggcggggacgattacgagcggctggacgttcggagcgggggcagcactgcagatccctttcgcgatgcagatggcctacaggttcaatggcatcggtgtcacccagaacgtactctacgagaatcagaagctcatcgccaatcagttcaacagcgcgatcgggaagatccaggactccctgtcgagtacagcctccgcgttggggaagctgcaggacgtggttaaccacaacgcccaggccctgaacaccctggtgaagcagctgtcatccaagttcggggccatcagttcggtgctgaacgacatcttcagtcggctggaccccccggaggcggaggtccagatagatcgcctcatcaccgggcgcctccagagtttgcagacgtacgtgactcagcagctcatacgggctgctgagatacgtgcgtctgcaaacctggcggcgaccaagatgagcgagtgtgtacttggtcagagcaagcgggtcgacttctgcgggaagggctatcacctgatgtccttcccgcagagcgccccccacggggtggtcttcctgcacgtgacgtatgtgccggcgcaggagaagaacttcaccactgcgccggccatatgtcacgacgggaaggcccacttcccccgggagggcgtgttcgtgtcgaatgggacgcactggttcgtcacccagcggaacttctatgaaccacagataatcaccactgacaacaccttcgtcagtgggaactgcgatgtggtcataggaatcgtcaacaacacggtgtacgacccccttcagcccgagctggactcgttcaaggaggagctggacaaatacttcaagaaccacacgagcccggatgttgacctcggggacattagcggaatcaatgcctccgtggtcaacatccaaaaggagatcgacaggctcaacgaggtggccaagaacctcaacgagagcctgatcgatctccaggagctcggcaagtacgagcagtacatcaagtggccgtggtacatatggctggggttcatcgcagggctgatcgcgatcgtgatggtcacgatcatgctctgctgcatgacctcgtgctgctcgtgcttgaagggctgctgctcgtgtggttcttgctgcaagttcgacgaggacgattccgagccggtgctgaagggggtcaaactgcactacacctgataatctagattaagtgcttcccacttaaaacatatcaggccttctatttatttaaatatttaaattttatatttattgttgaatgtatggtttgctacctattgtaactattattcttaatcttaaaactataaatatggatcttttatgattctttttgtaagccctaggggctctaaaatggtttcacttatttatcccaaaatttcattgcaaaaaaaaaaaaaaaaaaaaaaaaaaaaaagcatatgactaaaaaaaaaaaaaaaaaaaaaaaaaaaaaaaaaaaaaaaaaaaaaaaaaaaaaaaaaaaaaaaaaaaaaaaaaaaaaaaaaaaaaaaagaagagcgtttaaacacgtgatatctggcctcatgggccttcctttcactgcccgctttccagtcgggaaacctgtcgtgccagctgcattaacatggtcatagctgtttccttgcgtattgggcgctctccgcttcctcgctcactgactcgctgcgctcggtcgttcgggtaaagcctggggtgcctaatgagcaaaaggccagcaaaaggccaggaaccgtaaaaaggccgcgttgctggcgtttttccataggctccgcccccctgacgagcatcacaaaaatcgacgctcaagtcagaggtggcgaaacccgacaggactataaagataccaggcgtttccccctggaagctccctcgtgcgctctcctgttccgaccctgccgcttaccggatacctgtccgcctttctcccttcgggaagcgtggcgctttctcatagctcacgctgtaggtatctcagttcggtgtaggtcgttcgctccaagctgggctgtgtgcacgaaccccccgttcagcccgaccgctgcgccttatccggtaactatcgtcttgagtccaacccggtaagacacgacttatcgccactggcagcagccactggtaacaggattagcagagcgaggtatgtaggcggtgctacagagttcttgaagtggtggcctaactacggctacactagaagaacagtatttggtatctgcgctctgctgaagccagttaccttcggaaaaagagttggtagctcttgatccggcaaacaaaccaccgctggtagcggtggtttttttgtttgcaagcagcagattacgcgcagaaaaaaaggatctcaagaagatcctttgatcttttctacggggtctgacgctcagtggaacgaaaactcacgttaagggattttggtcatgaatacacggtgcctgactgcgttagcaatttaactgtgataaactaccgcattaaagcttatcgatgataagctgtcaaacatgagaattcttagaaaaactcatcgagcatcaaatgaaactgcaatttattcatatcaggattatcaataccatatttttgaaaaagccgtttctgtaatgaaggagaaaactcaccgaggcagttccataggatggcaagatcctggtatcggtctgcgattccgactcgtccaacatcaatacaacctattaatttcccctcgtcaaaaataaggttatcaagtgagaaatcaccatgagtgacgactgaatccggtgagaatggcaaaagcttatgcatttctttccagacttgttcaacaggccagccattacgctcgtcatcaaaatcactcgcatcaaccaaaccgttattcattcgtgattgcgcctgagcgagacgaaatacgcgatcgctgttaaaaggacaattacaaacaggaatcgaatgcaaccggcgcaggaacactgccagcgcatcaacaatattttcacctgaatcaggatattcttctaatacctggaatgctgttttcccggggatcgcagtggtgagtaaccatgcatcatcaggagtacggataaaatgcttgatggtcggaagaggcataaattccgtcagccagtttagtctgaccatctcatctgtaacatcattggcaacgctacctttgccatgtttcagaaacaactctggcgcatcgggcttcccatacaatcgatagattgtcgcacctgattgcccgacattatcgcgagcccatttatacccatataaatcagcatccatgttggaatttaatcgcggcctcgagcaagacgtttcccgttgaatatggctcataacaccccttgtattactgtttatgtaagcagacagttttattgttcatgagcggatacatatttgaatgtatttagaaaaataaacaaataggggttccgcgcacatttccccgaaaagtgccacctaaattgtaagcgttaatattttgttaaaattcgcgttaaatttttgttaaatcagctcattttttaaccaataggccgaaatcggcaaaatcccttataaatcaaaagaatagaccgagatagggttgagtggccgctacagggcgctcccattcgccattcaggctgcgcaactgttgggaagggcgtttcggtgcgggcctcttcgctattacgccagctggcgaaagggggatgtgctgcaaggcgattaagttgggtaacgccagggttttcccagtcac

SEQ ID NO: 208 - DNA, 6250 bp, synthetic construct
  source 1..6250: mol_type = other DNA
gttgggtaacgccagggttttcccagtcacacgcgtgcctaaattaatacgactcactataaggagaagctgtctatcgggctccagcggtcatgttcgtgtttctggtgctgctgcccctggtgagcagccagtgcgtgaacctgatcaccaggacccagagttacaccaacagcttcacccggggcgtgtactaccccgacaaggtgttcaggagcagcgtgctgcacagcacccaggacctgttcctgcccttcttcagcaacgtgacctggttccacgccatcagcggcaccaacggcaccaagcggttcgacaaccccgtgttgcccttcaacgacggcgtgtacttcgccagcaccgagaagagtaacatcatccggggctggatcttcggcaccaccctggactccaagacccagagcctgctgatcgtgaacaacgccaccaacgtggtgatcaaggtgtgcgagtttcagttctgcaacgaccccttcctggacgtgtactaccacaagaacaacaagagctggatggagagcgagttcagggtgtacagcagcgccaacaactgcaccttcgagtacgtgagccagcccttcctgatggacctggagggcaaacagggcaacttcaagaacctgcgggagttcgtgttcaagaatatcgacggctacttcaagatctacagcaagcacacccccatcaacctgggcagggacctgccccagggcttcagcgccctggagcccctggtggacctgcccatcggcatcaacatcacccggttccagaccctgctggccctgcaccggagctacctgacccccggcgacagcagcagcggctggaccgccggcgccgccgcctactacgtgggctacctgcagcccaggaccttcctgctgaagtacaacgagaacggcaccatcaccgacgccgtggactgtgccctggaccccctgagcgagaccaagtgcaccctgaagagtttcaccgtggagaagggcatctaccagaccagcaacttcagggtgcagcccaccgagagcatcgtgaggttccccaacatcaccaacctgtgccccttcgacgaggtgttcaacgccacccggttcgccagcgtgtacgcctggaaccggaagcggatcagcaactgcgtggccgactacagcgtgctgtacaacttcgcccccttcttcgccttcaagtgctacggcgtgagccccaccaaactgaacgacctatgcttcaccaacgtgtacgccgacagcttcgtgatcaggggtaacgaggtgagccagatcgcccccggccagaccggcaacatcgccgactacaactacaagctgcccgacgacttcaccggctgcgtgatcgcctggaacagcaacaagctggacagcaaggtgggcggcaactacaactaccggtacaggctgttccggaagagtaacctgaagcccttcgagagggacatcagcaccgagatctaccaagccggcaacaagccctgcaacggcgtggccggcgtgaactgctacttccccctgcagagctacggcttccggcccacctacggcgtgggccaccagccctaccgggtggtggtgctgagcttcgagctgctgcacgcccccgccaccgtgtgcggccccaagaagagtaccaacctggtgaagaataagtgcgtgaacttcaacttcaacggcctgaccggcaccggcgtgctgaccgagagcaacaagaagttcctgcccttccagcagttcggcagggacatcgccgacaccaccgacgccgtgcgggacccccagaccctggagatcctggacatcaccccctgcagcttcggcggcgtgagcgtgatcacccccggcaccaacaccagcaaccaggtggccgtgctgtaccagggcgtgaactgcaccgaggtgcccgtggccatccacgccgaccagctgacccccacctggcgggtgtacagcaccggcagcaacgtgttccagacccgagccggctgcctgatcggcgccgagtacgtgaacagcagctacgagtgcgacatccccatcggcgccggcatctgcgccagctaccagacacagaccaagagccacaggcgggcccggagcgtggccagccagagcatcatcgcctacaccatgagcctgggcgccgagaacagcgtcgcctacagcaacaacagcatcgccatcccgaccaacttcaccatcagcgtgaccaccgagatcctgcccgtgagcatgaccaagaccagcgtggactgcaccatgtacatctgcggcgacagcaccgagtgcagcaacctgctgctgcagtacggcagcttctgcacccagctgaagcgagccctgaccggcatcgccgtggagcaggacaagaacacccaggaggtgttcgcccaggtgaagcagatctacaagaccccccccataaagtacttcggcggcttcaacttcagccagatcctgcctgaccccagcaagcccagcaagcggagcttcatcgaggacctgctgttcaacaaggtgaccctggccgacgccggcttcatcaagcagtacggcgactgcctgggcgacatcgccgcccgggacctgatatgcgcccagaagttcaacggcctgaccgtgctgccccccctgctgaccgacgagatgatcgcccagtacaccagcgccctgctggccggcaccatcaccagcggctggacgttcggcgccggcgccgccctgcagatccccttcgccatgcagatggcctaccgcttcaacggcatcggcgtgacccagaacgtgctgtacgagaaccagaagctgatcgccaaccagttcaacagcgccatcggcaagatccaggacagcctgagcagcaccgccagcgccctgggcaagctgcaggacgtggtgaaccacaacgcccaggccctgaacaccctggtgaagcagctgagcagcaagttcggcgccatcagcagcgtgctgaacgacatcctgagccggctggacccccccgaggcggaggtgcagatcgacagactgatcaccggccggctgcagagcctgcagacctacgtgacccagcagctgatccgggccgccgagatccgggccagcgccaacctggccgccaccaagatgagcgagtgcgtgctgggccagtccaagcgggtggacttctgcggcaagggctaccacctgatgagcttcccccagagcgccccccacggcgtggtgttcctgcacgtgacctacgtgcccgcccaggagaagaacttcaccaccgcccccgccatctgccacgacggcaaggcccacttcccccgggagggcgtgttcgtgagcaacggcacccactggttcgtgacccagcggaacttctatgagccccagatcatcaccaccgacaacaccttcgtgagcggcaattgcgacgtggtgatcggcatcgtgaacaacaccgtgtacgaccccctgcagcccgagctggacagcttcaaggaggagctggacaagtacttcaagaaccacaccagccccgacgtggacctgggcgacatcagcggcatcaatgccagcgtggtgaacatccagaaggagatcgacaggctgaacgaggtggccaagaacctgaacgagagcctgatcgacctgcaggagctgggcaagtacgagcagtacatcaagtggccctggtacatctggctgggcttcatcgccggcctgatcgcaatcgtgatggtgaccatcatgctgtgctgcatgaccagctgctgcagctgcctgaagggctgctgcagctgcggcagctgctgcaagttcgacgaggacgacagcgagcccgtgctgaagggcgtgaagctgcactacacctgataatctagagccgccgctccagctttgcacgtttcgatcccaaaggccctttttagggccgaccattcattgcaaaaaaaaaaaaaaaaaaaaaaaaaaaaaagcatatgactaaaaaaaaaaaaaaaaaaaaaaaaaaaaaaaaaaaaaagaagagcgtttaaacacgtgatatctggcctcatgggccttcctttcactgcccgctttccagtcgggaaacctgtcgtgccagctgcattaacatggtcatagctgtttccttgcgtattgggcgctctccgcttcctcgctcactgactcgctgcgctcggtcgttcgggtaaagcctggggtgcctaatgagcaaaaggccagcaaaaggccaggaaccgtaaaaaggccgcgttgctggcgtttttccataggctccgcccccctgacgagcatcacaaaaatcgacgctcaagtcagaggtggcgaaacccgacaggactataaagataccaggcgtttccccctggaagctccctcgtgcgctctcctgttccgaccctgccgcttaccggatacctgtccgcctttctcccttcgggaagcgtggcgctttctcatagctcacgctgtaggtatctcagttcggtgtaggtcgttcgctccaagctgggctgtgtgcacgaaccccccgttcagcccgaccgctgcgccttatccggtaactatcgtcttgagtccaacccggtaagacacgacttatcgccactggcagcagccactggtaacaggattagcagagcgaggtatgtaggcggtgctacagagttcttgaagtggtggcctaactacggctacactagaagaacagtatttggtatctgcgctctgctgaagccagttaccttcggaaaaagagttggtagctcttgatccggcaaacaaaccaccgctggtagcggtggtttttttgtttgcaagcagcagattacgcgcagaaaaaaaggatctcaagaagatcctttgatcttttctacggggtctgacgctcagtggaacgaaaactcacgttaagggattttggtcatgaatacacggtgcctgactgcgttagcaatttaactgtgataaactaccgcattaaagcttatcgatgataagctgtcaaacatgagaattcttagaaaaactcatcgagcatcaaatgaaactgcaatttattcatatcaggattatcaataccatatttttgaaaaagccgtttctgtaatgaaggagaaaactcaccgaggcagttccataggatggcaagatcctggtatcggtctgcgattccgactcgtccaacatcaatacaacctattaatttcccctcgtcaaaaataaggttatcaagtgagaaatcaccatgagtgacgactgaatccggtgagaatggcaaaagcttatgcatttctttccagacttgttcaacaggccagccattacgctcgtcatcaaaatcactcgcatcaaccaaaccgttattcattcgtgattgcgcctgagcgagacgaaatacgcgatcgctgttaaaaggacaattacaaacaggaatcgaatgcaaccggcgcaggaacactgccagcgcatcaacaatattttcacctgaatcaggatattcttctaatacctggaatgctgttttcccggggatcgcagtggtgagtaaccatgcatcatcaggagtacggataaaatgcttgatggtcggaagaggcataaattccgtcagccagtttagtctgaccatctcatctgtaacatcattggcaacgctacctttgccatgtttcagaaacaactctggcgcatcgggcttcccatacaatcgatagattgtcgcacctgattgcccgacattatcgcgagcccatttatacccatataaatcagcatccatgttggaatttaatcgcggcctcgagcaagacgtttcccgttgaatatggctcataacaccccttgtattactgtttatgtaagcagacagttttattgttcatgagcggatacatatttgaatgtatttagaaaaataaacaaataggggttccgcgcacatttccccgaaaagtgccacctaaattgtaagcgttaatattttgttaaaattcgcgttaaatttttgttaaatcagctcattttttaaccaataggccgaaatcggcaaaatcccttataaatcaaaagaatagaccgagatagggttgagtggccgctacagggcgctcccattcgccattcaggctgcgcaactgttgggaagggcgtttcggtgcgggcctcttcgctattacgccagctggcgaaagggggatgtgctgcaaggcgattaa

SEQ ID NO: 209 - DNA, 6250 bp, synthetic construct
  source 1..6250: mol_type = other DNA
acgcgtgcctaaattaatacgactcactataaggagaagctgtctatcgggctccagcggtcatgtttgtgttcctggtgctgctgccactggtgagctctcagtgcgtgaatctgatcacacgcacccagagctacaccaacagcttcacccgcggggtgtactaccccgacaaggtgttcaggtcctccgtgctgcacagcacacaggacctgttcctgcccttcttcagcaacgtgacctggtttcacgccatcagcgggactaacggaaccaagaggttcgacaatcccgtgctgccatttaatgacggcgtgtacttcgccagcaccgagaagagtaacattatcaggggctggatctttggcaccacactggatagcaagacacagtccctgctgattgtgaacaacgctaccaacgtggtgatcaaagtgtgcgagtttcagttctgcaacgatccctttctggatgtgtactaccacaagaacaacaagtcctggatggagtccgagttccgggtctacagcagcgccaacaattgcaccttcgagtacgtgtcccagcccttcctgatggacctggagggcaagcaggggaacttcaagaacctgagggagttcgtgttcaagaacatcgacggatatttcaagatctactcgaagcacactcccatcaacctggggcgggacctgccccagggcttcagcgccctggaacccctggtcgatctgcccattggaattaatatcacacgctttcagaccctgctggctctgcaccggagctacctgacgccaggggacagctctagtggctggaccgccggggctgcggcctactacgtgggctacctgcagccccggacattcctgctgaagtacaacgagaacggcacgatcacagacgctgtggattgtgccctcgatcctctgtccgagaccaagtgtacactgaagagtttcaccgtggagaaggggatctaccagacctccaacttcagggtgcagccgaccgagagcattgtgcgcttcccaaacatcacaaacctgtgcccattcgacgaagtgttcaatgccactcggttcgcttcggtgtacgcttggaatcggaagaggatcagcaactgcgtggccgactactctgtgctgtacaacttcgccccattcttcgccttcaagtgctatggggtgtcccccacaaagctgaacgacctgtgcttcaccaacgtgtacgcggacagctttgtgatccgggggaacgaggtgtctcagattgctcccggccagacaggcaacatcgccgactacaattacaagctgcccgacgacttcacaggctgtgtgatcgcttggaactccaacaaactggactccaaggtgggcggcaactacaactacaggtaccgcctgttccggaagagtaatctgaagcccttcgagagggacatcagcacagagatctaccaggccggcaacaagccctgcaacggggtggccggggtgaactgctatttcccgctgcagagctacggatttcggcccacctacggggtggggcaccagccctaccgcgtggtggtgctgagcttcgagctgctgcacgccccggccaccgtgtgcgggcctaagaagagtaccaacctggtgaagaacaagtgtgtgaactttaatttcaatgggctgaccgggaccggggtgctgacagagagcaacaagaagttcctgcccttccagcagttcggccgggacatcgccgacaccaccgatgccgtccgggatccccagaccctggagatcctggacatcaccccctgcagctttgggggggtgtctgtgatcacacctgggacgaacacctccaaccaggtggcggtgctgtaccagggcgtgaattgcacggaggtgcccgtggcgattcacgccgaccagctgacccccacctggcgggtgtactccaccggctccaacgtgttccagaccagggccggctgtctgatcggagctgagtacgtgaattccagctacgagtgcgacatccccatcggagctggaatttgcgccagctaccagactcagaccaagagccaccggagggcccggagcgtggcctcccagagcatcatcgcctacacaatgagcctgggggccgagaactccgtggcctactccaacaacagcatcgctatccccacaaatttcaccatcagcgtgaccacagagatcctgccggtctccatgaccaagacctctgtggactgcacgatgtacatttgtggggatagcaccgagtgcagcaacctgctgctgcagtacggcagcttctgcactcagctgaagcgggccctgactggaatcgcggtggagcaggacaagaacacccaggaggtgtttgcccaggtgaagcagatctacaagacaccccccattaagtatttcggggggtttaacttcagccagatcctgccagacccatccaaaccgagcaagaggtccttcatcgaggacctcctgttcaacaaggtgaccctggcggacgctggcttcatcaagcagtacggcgactgcctgggcgacatcgctgcgagggacctgatctgcgctcagaagttcaatgggctgaccgtgctgccccccctgctcacggacgagatgatcgcccagtacacatccgctctcctggccggcaccattaccagcggatggaccttcggggctggagccgccctgcagatccctttcgccatgcagatggcctacaggttcaacgggatcggggtgactcagaatgtcctgtacgagaaccagaagctgatcgccaaccagttcaacagcgccatcgggaagattcaggacagcctgagctccacagcttccgccctggggaagctgcaggacgtggtgaaccacaacgctcaggccctgaacaccctggtgaagcagctgtcgagcaagttcggcgccatcagctcggtgctcaacgacattctgagtcgcctcgatccccctgaggccgaagtgcagatcgacaggctgatcacagggcggctccagtccctgcagacctacgtgactcagcagctcatcagggctgctgagatcagggcctccgccaacctggccgccaccaagatgagcgagtgtgtgctgggccagtccaaacgggtggacttctgtgggaagggctatcacctgatgtccttcccacagagcgccccccatggggtggtgttcctgcacgtgacatatgtgccagcgcaggagaagaacttcaccacagcgccggccatatgtcacgacggcaaggcgcacttccccagggagggcgtgttcgtgagcaacgggacccactggttcgtgacccagcggaacttctacgagccgcagatcatcaccaccgacaacaccttcgtgagcgggaactgcgacgtggtgatcggcatcgtgaacaacaccgtgtacgaccccctgcagcccgagctggactccttcaaggaggagctggacaagtacttcaagaaccacacgagccctgacgtggacctgggggacatctccgggatcaacgcctcggtggtgaacatccagaaagagatcgaccgcctgaacgaggtggccaagaacctgaacgagtccctgatcgacctgcaggagctggggaagtacgagcagtacattaaatggccctggtacatctggctggggttcatcgccggcctgatcgccatcgtgatggtgaccatcatgctgtgctgcatgaccagctgctgcagctgcctgaagggctgctgcagctgcgggtcgtgctgcaagttcgacgaggatgactccgagcccgtgctgaagggggtgaagctgcactacacctgataatctagagccgccgctccagctttgcacgtttcgatcccaaaggccctttttagggccgaccattcattgcaaaaaaaaaaaaaaaaaaaaaaaaaaaaaagcatatgactaaaaaaaaaaaaaaaaaaaaaaaaaaaaaaaaaaaaaagaagagcgtttaaacacgtgatatctggcctcatgggccttcctttcactgcccgctttccagtcgggaaacctgtcgtgccagctgcattaacatggtcatagctgtttccttgcgtattgggcgctctccgcttcctcgctcactgactcgctgcgctcggtcgttcgggtaaagcctggggtgcctaatgagcaaaaggccagcaaaaggccaggaaccgtaaaaaggccgcgttgctggcgtttttccataggctccgcccccctgacgagcatcacaaaaatcgacgctcaagtcagaggtggcgaaacccgacaggactataaagataccaggcgtttccccctggaagctccctcgtgcgctctcctgttccgaccctgccgcttaccggatacctgtccgcctttctcccttcgggaagcgtggcgctttctcatagctcacgctgtaggtatctcagttcggtgtaggtcgttcgctccaagctgggctgtgtgcacgaaccccccgttcagcccgaccgctgcgccttatccggtaactatcgtcttgagtccaacccggtaagacacgacttatcgccactggcagcagccactggtaacaggattagcagagcgaggtatgtaggcggtgctacagagttcttgaagtggtggcctaactacggctacactagaagaacagtatttggtatctgcgctctgctgaagccagttaccttcggaaaaagagttggtagctcttgatccggcaaacaaaccaccgctggtagcggtggtttttttgtttgcaagcagcagattacgcgcagaaaaaaaggatctcaagaagatcctttgatcttttctacggggtctgacgctcagtggaacgaaaactcacgttaagggattttggtcatgaatacacggtgcctgactgcgttagcaatttaactgtgataaactaccgcattaaagcttatcgatgataagctgtcaaacatgagaattcttagaaaaactcatcgagcatcaaatgaaactgcaatttattcatatcaggattatcaataccatatttttgaaaaagccgtttctgtaatgaaggagaaaactcaccgaggcagttccataggatggcaagatcctggtatcggtctgcgattccgactcgtccaacatcaatacaacctattaatttcccctcgtcaaaaataaggttatcaagtgagaaatcaccatgagtgacgactgaatccggtgagaatggcaaaagcttatgcatttctttccagacttgttcaacaggccagccattacgctcgtcatcaaaatcactcgcatcaaccaaaccgttattcattcgtgattgcgcctgagcgagacgaaatacgcgatcgctgttaaaaggacaattacaaacaggaatcgaatgcaaccggcgcaggaacactgccagcgcatcaacaatattttcacctgaatcaggatattcttctaatacctggaatgctgttttcccggggatcgcagtggtgagtaaccatgcatcatcaggagtacggataaaatgcttgatggtcggaagaggcataaattccgtcagccagtttagtctgaccatctcatctgtaacatcattggcaacgctacctttgccatgtttcagaaacaactctggcgcatcgggcttcccatacaatcgatagattgtcgcacctgattgcccgacattatcgcgagcccatttatacccatataaatcagcatccatgttggaatttaatcgcggcctcgagcaagacgtttcccgttgaatatggctcataacaccccttgtattactgtttatgtaagcagacagttttattgttcatgagcggatacatatttgaatgtatttagaaaaataaacaaataggggttccgcgcacatttccccgaaaagtgccacctaaattgtaagcgttaatattttgttaaaattcgcgttaaatttttgttaaatcagctcattttttaaccaataggccgaaatcggcaaaatcccttataaatcaaaagaatagaccgagatagggttgagtggccgctacagggcgctcccattcgccattcaggctgcgcaactgttgggaagggcgtttcggtgcgggcctcttcgctattacgccagctggcgaaagggggatgtgctgcaaggcgattaagttgggtaacgccagggttttcccagtcac

SEQ ID NO: 210 - DNA, 6250 bp, synthetic construct
  source 1..6250: mol_type = other DNA
acgcgtgcctaaattaatacgactcactataaggagaagctgtctatcgggctccagcggtcatgtttgtgttcctggtgctgctccccctggtcagctcacagtgcgtcaacctcatcaccaggactcagagctacaccaacagtttcactcggggggtctactaccccgacaaggtgttcaggagcagcgtcctgcacagcacgcaggacctgttcctgccgttcttcagcaacgtgacctggtttcacgccatcagtgggaccaacgggacgaagaggttcgataatcccgtgctcccattcaacgatggcgtgtacttcgccagcacggagaagagtaacatcatcaggggctggatctttgggaccacactggactcaaagacccagtccctgctgatcgtgaataacgccaccaatgtggtgattaaggtgtgcgagttccagttctgtaatgacccctttctcgacgtgtactaccacaagaacaacaagtcctggatggagagcgagttccgggtgtacagcagcgccaacaactgtacattcgagtatgtctcccagcccttcctgatggacctcgaggggaagcagggcaactttaagaacctgagggagttcgtgttcaagaacatcgacgggtacttcaagatctactcgaagcacacccccatcaatctgggacgcgacctccctcagggcttcagcgccctggagcccctcgtggacctgcccattggaatcaacatcaccaggttccagacgctcctggccctgcacaggagctacctgacacctggtgacagctccagtgggtggactgcaggtgccgccgcctactacgtggggtacctgcagcccaggacgttcctgctgaagtacaacgagaatgggaccattacagacgctgtggactgcgcactggaccccttaagcgagaccaagtgtactctgaagtccttcaccgtcgagaagggcatctatcagaccagcaatttcagagtccagccaactgagagcatcgtgaggttccccaacatcacaaacctgtgtccctttgacgaggtgttcaacgccacccggttcgcctccgtgtacgcctggaatcgcaagagaatcagcaactgtgtcgcagattattcagtgctgtacaacttcgccccattcttcgccttcaagtgctatggggtgagccccacaaagctgaatgatctgtgcttcacaaacgtgtatgctgattcttttgtgattcgaggcaacgaggtgagccagattgccccagggcagaccgggaacatcgcggactataattataagctccccgacgactttaccggctgcgtgattgcctggaacagcaataagctcgacagcaaggtcggggggaattataattataggtaccgcctgttccgaaagtccaacctgaagcccttcgagcgggatatctccacggagatctaccaggctggcaacaagccctgcaacggcgtggcaggggtgaactgctacttccccctgcagagctacgggttcaggcccacctacggggtggggcaccagccctaccgcgtggtggtcctgagcttcgagctcctgcacgcccccgcaacagtgtgcggtccaaagaagtccaccaacctggtgaagaataagtgcgtgaacttcaacttcaacggactcaccgggaccggcgtcctgaccgagtccaacaagaagttcctgcccttccagcagttcggcagagacatcgccgacactacggacgcggtccgggatccccagaccctggagatcctggacatcacgccctgtagtttcggcggtgtctctgtcattactcccgggaccaatacatccaaccaggtggcggtgctgtaccagggcgtgaattgcacggaggtgcccgtggcaattcacgccgaccagctgacccccacctggcgggtgtacagcaccgggagtaacgtgtttcagacacgggcaggatgtctgattggcgctgagtatgtgaacagcagctacgagtgcgacattcccatcggcgcggggatctgcgctagctatcagacccagaccaagagccacaggagggctcgctctgtggcctcacagagcatcatcgcctacacgatgagtctgggcgctgaaaacagcgtggcctactccaacaacagcatcgccatccctaccaacttcaccatctcagtgaccacagagatcctgcccgtgtccatgacaaagacttccgtggactgcaccatgtacatctgcggggacagcaccgagtgttccaacctcctgctccagtacggcagtttctgtacacagctcaagcgggccctgacaggaattgccgtggagcaggacaagaacactcaggaggtgtttgcccaggtcaagcagatctacaagacaccccccatcaagtacttcggggggttcaacttctcccagatcctgcccgaccccagcaagccctccaagaggagctttattgaagacctgctctttaataaggtgactctcgccgacgcagggttcatcaagcagtacggggactgcctgggggatatcgccgctcgagatctcatctgtgcccagaagttcaacgggctgaccgtcctgccccccctgctcacagatgagatgatcgcccagtacaccagcgccctgctggctgggaccatcacttcaggttggacgttcggagctggcgccgccctgcagatcccattcgccatgcagatggcctacaggttcaacgggatcggggtgactcagaatgtcctgtacgagaaccagaagctgattgccaaccagtttaactcagccatcgggaagattcaggacagcctgagcagcaccgcatccgccctggggaagctccaggatgtggtgaaccacaacgctcaggccctgaacaccctggtgaagcagctgagctccaagttcggggcaatcagctcggtcctcaacgacattctgagtcgcctcgatccccccgaggctgaggtccagatcgaccggctgatcactggtcggctgcagagtctgcagacctacgtgactcagcagctgatcagggcagccgagatccgggcctcagccaacctggcagccaccaagatgtccgagtgtgtcctggggcagtctaagcgggtggacttctgtgggaagggctaccacctgatgtccttcccacagagcgcaccccacggggtggtgttcctccacgtgacctacgtgcccgcacaggagaagaacttcaccaccgccccggccatctgccacgatggcaaggcccacttcccccgggaaggggtcttcgtgtcaaacgggacacactggtttgtgacccagcggaacttctacgagcctcagatcatcaccactgacaacaccttcgtcagtgggaactgcgacgtggtcatcggtattgtgaacaataccgtgtacgacccactgcagcccgagctcgactccttcaaggaggagctcgacaagtacttcaaaaaccatacttccccagacgtggacctgggcgacatcagcggcatcaacgccagcgtcgtcaatatccagaaggagatcgacaggctcaatgaggtggccaagaacctcaatgagagcctgatcgatctccaggaactggggaagtatgagcagtacatcaagtggccttggtacatctggctgggcttcatcgctggtctgattgccatcgtgatggtgaccattatgctgtgctgcatgaccagctgctgcagctgcctgaagggctgctgcagctgcgggtcatgctgcaagttcgatgaggacgacagcgagcctgtcctgaagggggtcaagctgcactacacctgataatctagagccgccgctccagctttgcacgtttcgatcccaaaggccctttttagggccgaccattcattgcaaaaaaaaaaaaaaaaaaaaaaaaaaaaaagcatatgactaaaaaaaaaaaaaaaaaaaaaaaaaaaaaaaaaaaaaagaagagcgtttaaacacgtgatatctggcctcatgggccttcctttcactgcccgctttccagtcgggaaacctgtcgtgccagctgcattaacatggtcatagctgtttccttgcgtattgggcgctctccgcttcctcgctcactgactcgctgcgctcggtcgttcgggtaaagcctggggtgcctaatgagcaaaaggccagcaaaaggccaggaaccgtaaaaaggccgcgttgctggcgtttttccataggctccgcccccctgacgagcatcacaaaaatcgacgctcaagtcagaggtggcgaaacccgacaggactataaagataccaggcgtttccccctggaagctccctcgtgcgctctcctgttccgaccctgccgcttaccggatacctgtccgcctttctcccttcgggaagcgtggcgctttctcatagctcacgctgtaggtatctcagttcggtgtaggtcgttcgctccaagctgggctgtgtgcacgaaccccccgttcagcccgaccgctgcgccttatccggtaactatcgtcttgagtccaacccggtaagacacgacttatcgccactggcagcagccactggtaacaggattagcagagcgaggtatgtaggcggtgctacagagttcttgaagtggtggcctaactacggctacactagaagaacagtatttggtatctgcgctctgctgaagccagttaccttcggaaaaagagttggtagctcttgatccggcaaacaaaccaccgctggtagcggtggtttttttgtttgcaagcagcagattacgcgcagaaaaaaaggatctcaagaagatcctttgatcttttctacggggtctgacgctcagtggaacgaaaactcacgttaagggattttggtcatgaatacacggtgcctgactgcgttagcaatttaactgtgataaactaccgcattaaagcttatcgatgataagctgtcaaacatgagaattcttagaaaaactcatcgagcatcaaatgaaactgcaatttattcatatcaggattatcaataccatatttttgaaaaagccgtttctgtaatgaaggagaaaactcaccgaggcagttccataggatggcaagatcctggtatcggtctgcgattccgactcgtccaacatcaatacaacctattaatttcccctcgtcaaaaataaggttatcaagtgagaaatcaccatgagtgacgactgaatccggtgagaatggcaaaagcttatgcatttctttccagacttgttcaacaggccagccattacgctcgtcatcaaaatcactcgcatcaaccaaaccgttattcattcgtgattgcgcctgagcgagacgaaatacgcgatcgctgttaaaaggacaattacaaacaggaatcgaatgcaaccggcgcaggaacactgccagcgcatcaacaatattttcacctgaatcaggatattcttctaatacctggaatgctgttttcccggggatcgcagtggtgagtaaccatgcatcatcaggagtacggataaaatgcttgatggtcggaagaggcataaattccgtcagccagtttagtctgaccatctcatctgtaacatcattggcaacgctacctttgccatgtttcagaaacaactctggcgcatcgggcttcccatacaatcgatagattgtcgcacctgattgcccgacattatcgcgagcccatttatacccatataaatcagcatccatgttggaatttaatcgcggcctcgagcaagacgtttcccgttgaatatggctcataacaccccttgtattactgtttatgtaagcagacagttttattgttcatgagcggatacatatttgaatgtatttagaaaaataaacaaataggggttccgcgcacatttccccgaaaagtgccacctaaattgtaagcgttaatattttgttaaaattcgcgttaaatttttgttaaatcagctcattttttaaccaataggccgaaatcggcaaaatcccttataaatcaaaagaatagaccgagatagggttgagtggccgctacagggcgctcccattcgccattcaggctgcgcaactgttgggaagggcgtttcggtgcgggcctcttcgctattacgccagctggcgaaagggggatgtgctgcaaggcgattaagttgggtaacgccagggttttcccagtcac

SEQ ID NO: 211 - DNA, 6250 bp, synthetic construct
  source 1..6250: mol_type = other DNA
acgcgtgcctaaattaatacgactcactataaggagaagctgtctatcgggctccagcggtcatgtttgtgttcctggtgctgctgccgctggtcagctcacagtgcgtgaacctgatcacgcgcacccagagctacaccaatagcttcacccggggggtgtactaccccgacaaggtgtttcgcagcagcgtgctgcactccacccaggacctgttcctgccgttcttctccaacgtgacctggttccacgccatcagcgggaccaacgggaccaagcggttcgacaaccccgtgctcccgtttaatgatggcgtgtacttcgccagcacggagaagagtaacatcatccggggatggatcttcggcaccacactggactcaaagacccagtcactgctgatcgtgaacaacgccacgaacgtggtgatcaaggtctgtgagttccagttctgcaacgatccgttcctggacgtgtactatcacaagaacaacaagtcctggatggagtccgagttccgggtgtactccagcgccaacaactgtacgttcgagtacgtgtcccagcccttcctgatggacctcgaggggaagcagggcaactttaaaaacctgcgggagttcgtgttcaagaacatcgacgggtactttaagatctacagcaaacacaccccgatcaacctggggcgcgacctcccgcaggggtttagcgccctggagcccctcgtggacttgcccatcgggatcaacatcacccggttccagacgctcctggccctgcacaggagctacctgacgccgggcgactccagctccggctggaccgccggggctgcagcctactacgtgggctacctgcagccccggacgttcttgttgaaatacaacgagaacggcacaatcacggacgccgtggactgtgccctcgacccgcttagcgagaccaagtgcacactcaaaagcttcaccgtggagaaggggatctatcagacctcaaacttccgggtccagccgactgagagcatcgtgcggttccccaacattaccaacttgtgccccttcgatgaggttttcaacgccacgcggtttgccagtgtgtatgcctggaacaggaagcgcatcagcaactgcgtggcagactactcagtgctgtacaacttcgccccgttcttcgccttcaagtgctacggggtgagccccaccaagctgaacgacctctgcttcaccaacgtgtacgccgacagcttcgtgattcgcggcaacgaggtgtcccagatcgcccccgggcagaccgggaacatcgccgactacaactacaagctgccggacgacttcaccgggtgcgtgatcgcctggaacagcaataagctggactccaaggtgggcgggaactacaactaccgctaccggttgttccggaagagtaacctgaagccgttcgagcgcgacatcagcaccgagatctaccaggccggcaacaagccctgcaacggggtggcaggggtgaactgttactttccgctgcagagctacgggttcaggcccacctacggggtggggcaccagccctaccgcgtggtggtcctgagcttcgagctgctgcacgcccccgccaccgtctgtgggcccaagaagtccacgaacttggtgaagaacaagtgcgtgaacttcaactttaacgggctcacaggcacgggggtgttgacggagagtaacaagaagttcctgccattccagcagttcggcagggacatcgccgacaccacggacgccgtccgggatccccagaccctggagatcctggacatcaccccgtgcagcttcggcggcgtctctgtcatcacccccggcaccaacacgtccaaccaggtggccgtcctgtaccagggggtgaactgtactgaggtgccggtggcgatacacgcagaccagttgacccccacctggcgcgtgtacagcacgggcagcaacgtcttccagacacgcgccggctgcttgatcggcgccgagtacgtgaactcaagctacgagtgcgatatccccatcggcgcagggatctgcgcctcctaccagacccaaaccaagtcccacaggagggccagatccgtggccagccagagcatcatcgcctacacgatgagcctcggcgccgagaattccgtggcttacagcaacaactccatcgccatccccaccaacttcacaatcagcgtgaccacggagatcttgcccgtcagcatgaccaagacctccgtggattgcaccatgtatatctgtggggacagcaccgagtgttccaacctgctcctgcagtacgggtccttctgcacccagctgaagcgggccttgaccggcatcgcagtggagcaggacaagaacactcaggaggtgtttgcccaggtcaagcagatctacaagacccccccgatcaagtacttcggggggttcaacttcagccagatcctgcccgaccccagcaaaccctccaagcggagcttcatcgaagacctgctctttaacaaagtgacgctggccgacgccggcttcatcaagcagtacggcgactgtctgggagacatcgctgcccgggacctgatatgcgcccagaagttcaacgggctgacggtgttgccacccctgctcaccgacgagatgatcgcccagtacacctccgccctcctggccgggacgatcacctctggctggacgttcggcgccggggccgcattacagatccccttcgccatgcagatggcctatagatttaacgggattggcgtcacgcagaacgtgctgtacgagaaccagaagctgatcgctaaccagttcaatagcgccatcgggaagatccaggacagcttgagcagcacggcgagcgctctgggcaagctccaggacgtcgtgaatcacaatgctcaggccctgaacacgttggtgaagcagctctcatcaaagttcggcgccatcagcagtgtgctgaacgatatcctcagtcggctggaccccccggaggccgaggtccagatagatcgcctgatcacggggcggctgcagagcttgcagacgtacgtgactcagcagctcatccgggctgctgagatccgggcgtctgccaacttggcagccaccaagatgagcgagtgtgtgctgggccagagcaagcgggtcgacttctgcgggaagggctaccacctgatgtccttcccgcagagcgcccctcacggggtggtcttcctgcacgtgacatatgtgccggcccaggagaagaacttcaccacggccccggccatatgtcacgacgggaaggcccacttcccccgcgagggggtgtttgtgagtaacggaacccactggttcgtgactcagagaaacttctacgaaccacagataatcaccactgacaacaccttcgtcagtgggaattgcgacgtggtgatcgggatcgtgaacaacaccgtgtacgatcccctccagccggagctggactccttcaaggaggagctggacaagtacttcaagaaccacactagccccgacgtggatctcggagacatctccgggatcaacgctagcgtggtgaatatccagaaggagatcgacaggctcaacgaggtggccaagaacctcaacgagagcctgatcgatctccaggagctgggcaagtacgaacagtacatcaagtggccctggtacatctggctcggcttcatcgcaggactgatcgccattgtgatggtcaccatcatgctgtgctgcatgaccagctgctgcagctgcctgaagggctgctgcagctgcgggtcatgctgcaagttcgacgaggacgacagcgagccggtcctgaagggagtgaagctgcactacacttgataatctagagccgccgctccagctttgcacgtttcgatcccaaaggccctttttagggccgaccattcattgcaaaaaaaaaaaaaaaaaaaaaaaaaaaaaagcatatgactaaaaaaaaaaaaaaaaaaaaaaaaaaaaaaaaaaaaaagaagagcgtttaaacacgtgatatctggcctcatgggccttcctttcactgcccgctttccagtcgggaaacctgtcgtgccagctgcattaacatggtcatagctgtttccttgcgtattgggcgctctccgcttcctcgctcactgactcgctgcgctcggtcgttcgggtaaagcctggggtgcctaatgagcaaaaggccagcaaaaggccaggaaccgtaaaaaggccgcgttgctggcgtttttccataggctccgcccccctgacgagcatcacaaaaatcgacgctcaagtcagaggtggcgaaacccgacaggactataaagataccaggcgtttccccctggaagctccctcgtgcgctctcctgttccgaccctgccgcttaccggatacctgtccgcctttctcccttcgggaagcgtggcgctttctcatagctcacgctgtaggtatctcagttcggtgtaggtcgttcgctccaagctgggctgtgtgcacgaaccccccgttcagcccgaccgctgcgccttatccggtaactatcgtcttgagtccaacccggtaagacacgacttatcgccactggcagcagccactggtaacaggattagcagagcgaggtatgtaggcggtgctacagagttcttgaagtggtggcctaactacggctacactagaagaacagtatttggtatctgcgctctgctgaagccagttaccttcggaaaaagagttggtagctcttgatccggcaaacaaaccaccgctggtagcggtggtttttttgtttgcaagcagcagattacgcgcagaaaaaaaggatctcaagaagatcctttgatcttttctacggggtctgacgctcagtggaacgaaaactcacgttaagggattttggtcatgaatacacggtgcctgactgcgttagcaatttaactgtgataaactaccgcattaaagcttatcgatgataagctgtcaaacatgagaattcttagaaaaactcatcgagcatcaaatgaaactgcaatttattcatatcaggattatcaataccatatttttgaaaaagccgtttctgtaatgaaggagaaaactcaccgaggcagttccataggatggcaagatcctggtatcggtctgcgattccgactcgtccaacatcaatacaacctattaatttcccctcgtcaaaaataaggttatcaagtgagaaatcaccatgagtgacgactgaatccggtgagaatggcaaaagcttatgcatttctttccagacttgttcaacaggccagccattacgctcgtcatcaaaatcactcgcatcaaccaaaccgttattcattcgtgattgcgcctgagcgagacgaaatacgcgatcgctgttaaaaggacaattacaaacaggaatcgaatgcaaccggcgcaggaacactgccagcgcatcaacaatattttcacctgaatcaggatattcttctaatacctggaatgctgttttcccggggatcgcagtggtgagtaaccatgcatcatcaggagtacggataaaatgcttgatggtcggaagaggcataaattccgtcagccagtttagtctgaccatctcatctgtaacatcattggcaacgctacctttgccatgtttcagaaacaactctggcgcatcgggcttcccatacaatcgatagattgtcgcacctgattgcccgacattatcgcgagcccatttatacccatataaatcagcatccatgttggaatttaatcgcggcctcgagcaagacgtttcccgttgaatatggctcataacaccccttgtattactgtttatgtaagcagacagttttattgttcatgagcggatacatatttgaatgtatttagaaaaataaacaaataggggttccgcgcacatttccccgaaaagtgccacctaaattgtaagcgttaatattttgttaaaattcgcgttaaatttttgttaaatcagctcattttttaaccaataggccgaaatcggcaaaatcccttataaatcaaaagaatagaccgagatagggttgagtggccgctacagggcgctcccattcgccattcaggctgcgcaactgttgggaagggcgtttcggtgcgggcctcttcgctattacgccagctggcgaaagggggatgtgctgcaaggcgattaagttgggtaacgccagggttttcccagtcac

SEQ ID NO: 212 - DNA, 6250 bp, synthetic construct
  source 1..6250: mol_type = other DNA
acgcgtgcctaaattaatacgactcactataaggagaagctgtctatcgggctccagcggtcatgttcgtgttcctggtgctgctgccgctggtcagctcacagtgcgtgaacctgatcacgcgcacccagagctacacgaacagctttacccggggggtgtactaccccgacaaagtgttccgcagcagcgtgcttcactccactcaggacctgttcctgccgttcttctccaacgtgacctggtttcacgccatcagcgggaccaacgggaccaagcgcttcgacaaccccgtgctcccgttcaacgatggcgtgtacttcgccagcacggagaagagtaacatcatccgggggtggatcttcggcacgaccctggactccaagacccaatcactgctgatcgtgaacaacgccacgaacgtggtgatcaaggtctgcgagttccagttctgcaacgatccattcctggatgtgtactatcacaagaacaacaagtcctggatggagtccgagttccgggtgtactcaagcgccaacaactgtacgttcgagtacgtgtcccagcccttcctgatggacctcgaggggaagcagggcaacttcaagaacctgcgggagttcgtgttcaagaacatcgacgggtacttcaagatctactcgaagcacaccccgatcaatcttggacgcgatctcccgcagggctttagcgccctggagcccctcgtggacctgcccatcgggatcaacatcacccggttccagacgctcctggccctgcacaggagctacctgacgccgggtgactccagctccggctggaccgccggggctgcggcctactacgtgggctacttgcagccccggacgttcttgttgaagtacaacgagaacggcacaatcacggacgccgtggattgtgccctcgacccgctgagcgagaccaagtgcacactcaagagcttcaccgtggagaaggggatctatcagacctcaaatttccgggtccagccgacagagagtatcgttcggttcccgaacatcactaacttgtgcccctttgacgaggtgttcaacgccacgcggtttgcgagcgtgtacgcctggaacaggaagcgcatcagcaactgcgtggcggattactcagtgttgtacaacttcgccccgttcttcgccttcaagtgttacggggtgagccccacaaaactgaacgatctctgcttcaccaacgtgtatgccgacagctttgtgattcgcggcaacgaggtgtcccagatcgcccccgggcagaccgggaatatcgccgactacaactacaagctgccggacgacttcaccggttgcgtgattgcctggaacagcaataagctggactccaaggtgggcgggaattacaactaccgctaccggttgttcaggaagagtaacctgaagccgttcgagcgtgacatcagtaccgagatctaccaggccggcaacaagccctgcaacggggtggcgggggtgaactgttactttccgctgcagagctacgggttcaggcccacctacggggtggggcaccagccctaccgcgtggtggtcctgagcttcgagctgctgcacgcccccgccaccgtctgtgggcccaagaagtccacgaacttggtgaaaaacaagtgcgtgaacttcaacttcaacgggctcacgggcacgggggtgttgacggagagtaacaagaagttcctgccattccagcagttcggcagggacatcgccgacaccacggatgccgtccgggatccccagaccctggagatcctggacatcaccccgtgcagcttcggcggtgtctctgtcattacccccggcaccaacacgtccaaccaggtggccgtcctgtaccagggggtgaactgtactgaggtgccggtggcaatacacgcagaccagttgacccccacctggcgcgtgtacagcacgggcagcaacgtcttccagacacgcgccggctgcttgatcggcgccgagtacgtgaactcatcgtatgagtgtgatattccgattggcgcagggatctgtgcctcctaccagacccagaccaagtcccacaggagggccaggtccgtggccagtcagagtatcatcgcttatacgatgagcctcggcgccgagaacagcgtcgcctacagcaacaactccatcgctatccccacaaatttcaccatcagcgtgaccacggagatcttgcccgtcagcatgaccaagacctccgtggactgcacgatgtacatttgtggggatagcaccgagtgttccaacctgctcctgcagtacgggtcattctgcacgcagctgaagcgtgcattgaccggtattgccgtggagcaggacaagaacactcaggaggtgtttgctcaggtcaagcagatctacaagacgcccccgatcaagtacttcggcggcttcaacttcagccagatcctgcctgacccgagcaaaccctccaagcggagcttcatcgaggacctgctctttaacaaggtgacgctggccgacgccggcttcatcaagcagtacggcgactgtctgggagacatcgctgcccgtgacttgatatgcgcccagaagttcaacggtctgacggtgttgccaccgctgctcacagacgagatgatcgcccagtacacgtccgccctcctggccgggacgatcacatctggttggacgtttggtgccggggctgcattacagatccccttcgccatgcagatggcctacagattcaacggtattggtgtcacgcagaacgtgctttatgagaaccagaagctgattgccaaccagttcaatagcgcaatcgggaagatccaggacagcttgagcagtacggcgagcgccctggggaagctgcaggacgtcgtgaatcacaacgctcaggcactgaacacgttggtgaagcagctctcctcaaagttcggcgcgattagttcggtgctgaacgatattctcagtcggctggaccccccggaggccgaggtccagatagatcgcctcatcacggggcggctgcagagtttgcagacgtacgtgactcagcagctcatcagagctgctgagatccgtgcgtctgcaaacttggcagccaccaagatgagcgagtgtgtgcttggtcagagcaagcgggtcgatttctgcgggaagggctatcacctgatgtccttcccgcagagcgctccccacggcgtggtcttcctgcacgtgacgtatgtgccggcccaggagaagaacttcaccacggccccggccatatgtcacgacgggaaggcccacttcccccgtgagggggtgttcgtgagcaacggaacccactggttcgtgactcagagaaacttctacgagccacagataattaccactgacaacacttttgtcagtggtaattgcgacgtggtcatagggatcgtgaacaacaccgtttacgatcccctccagccggagctggactccttcaaggaggagctggataagtacttcaagaaccacactagccccgacgttgatctcggggacatctccgggatcaatgctagtgtggtgaatatacagaaggagatcgacaggctcaacgaggtggccaagaacctcaacgagagcctgatcgatctccaggagctgggcaagtacgagcagtacatcaagtggccttggtacatctggctcggcttcatcgcaggactgatcgccatcgtgatggtgaccatcatgctgtgctgcatgaccagctgctgcagctgcctgaagggctgctgcagctgcgggtcatgctgcaagttcgacgaggacgacagcgagccggtcctgaagggagtgaagctgcactacacctgataatctagagccgccgctccagctttgcacgtttcgatcccaaaggccctttttagggccgaccattcattgcaaaaaaaaaaaaaaaaaaaaaaaaaaaaaagcatatgactaaaaaaaaaaaaaaaaaaaaaaaaaaaaaaaaaaaaaagaagagcgtttaaacacgtgatatctggcctcatgggccttcctttcactgcccgctttccagtcgggaaacctgtcgtgccagctgcattaacatggtcatagctgtttccttgcgtattgggcgctctccgcttcctcgctcactgactcgctgcgctcggtcgttcgggtaaagcctggggtgcctaatgagcaaaaggccagcaaaaggccaggaaccgtaaaaaggccgcgttgctggcgtttttccataggctccgcccccctgacgagcatcacaaaaatcgacgctcaagtcagaggtggcgaaacccgacaggactataaagataccaggcgtttccccctggaagctccctcgtgcgctctcctgttccgaccctgccgcttaccggatacctgtccgcctttctcccttcgggaagcgtggcgctttctcatagctcacgctgtaggtatctcagttcggtgtaggtcgttcgctccaagctgggctgtgtgcacgaaccccccgttcagcccgaccgctgcgccttatccggtaactatcgtcttgagtccaacccggtaagacacgacttatcgccactggcagcagccactggtaacaggattagcagagcgaggtatgtaggcggtgctacagagttcttgaagtggtggcctaactacggctacactagaagaacagtatttggtatctgcgctctgctgaagccagttaccttcggaaaaagagttggtagctcttgatccggcaaacaaaccaccgctggtagcggtggtttttttgtttgcaagcagcagattacgcgcagaaaaaaaggatctcaagaagatcctttgatcttttctacggggtctgacgctcagtggaacgaaaactcacgttaagggattttggtcatgaatacacggtgcctgactgcgttagcaatttaactgtgataaactaccgcattaaagcttatcgatgataagctgtcaaacatgagaattcttagaaaaactcatcgagcatcaaatgaaactgcaatttattcatatcaggattatcaataccatatttttgaaaaagccgtttctgtaatgaaggagaaaactcaccgaggcagttccataggatggcaagatcctggtatcggtctgcgattccgactcgtccaacatcaatacaacctattaatttcccctcgtcaaaaataaggttatcaagtgagaaatcaccatgagtgacgactgaatccggtgagaatggcaaaagcttatgcatttctttccagacttgttcaacaggccagccattacgctcgtcatcaaaatcactcgcatcaaccaaaccgttattcattcgtgattgcgcctgagcgagacgaaatacgcgatcgctgttaaaaggacaattacaaacaggaatcgaatgcaaccggcgcaggaacactgccagcgcatcaacaatattttcacctgaatcaggatattcttctaatacctggaatgctgttttcccggggatcgcagtggtgagtaaccatgcatcatcaggagtacggataaaatgcttgatggtcggaagaggcataaattccgtcagccagtttagtctgaccatctcatctgtaacatcattggcaacgctacctttgccatgtttcagaaacaactctggcgcatcgggcttcccatacaatcgatagattgtcgcacctgattgcccgacattatcgcgagcccatttatacccatataaatcagcatccatgttggaatttaatcgcggcctcgagcaagacgtttcccgttgaatatggctcataacaccccttgtattactgtttatgtaagcagacagttttattgttcatgagcggatacatatttgaatgtatttagaaaaataaacaaataggggttccgcgcacatttccccgaaaagtgccacctaaattgtaagcgttaatattttgttaaaattcgcgttaaatttttgttaaatcagctcattttttaaccaataggccgaaatcggcaaaatcccttataaatcaaaagaatagaccgagatagggttgagtggccgctacagggcgctcccattcgccattcaggctgcgcaactgttgggaagggcgtttcggtgcgggcctcttcgctattacgccagctggcgaaagggggatgtgctgcaaggcgattaagttgggtaacgccagggttttcccagtcac

SEQ ID NO: 213 - DNA, 6250 bp, synthetic construct
  source 1..6250: mol_type = other DNA
acgcgtgcctaaattaatacgactcactataaggagaagctgtctatcgggctccagcggtcatgttcgtgtttctggtgttgttgccgctggtgtcgagccagtgcgtcaacctgatcacgaggacccagagttacaccaactccttcacgcggggagtgtactaccccgacaaggtgttccgctcgtctgtgctgcacagcacgcaggacctcttcctcccgttcttctccaatgtcacgtggttccacgcgatatcggggacgaacgggacgaagaggttcgataaccccgtgctgccgttcaacgacggggtgtacttcgcttcgacagagaagagtaacatcatccgcgggtggatattcggaaccactctcgactccaagacccagtccttgctgatagtgaacaacgccacgaacgtggtcatcaaggtctgcgaattccagttctgcaacgacccgttcctggacgtgtactatcacaagaacaacaagtcttggatggagagtgagttccgagtgtactcatccgcgaacaactgcaccttcgagtacgtcagccagccgttcctgatggacctcgaggggaagcagggcaacttcaagaacctgcgggagttcgtgttcaagaacattgatgggtacttcaagatctactcgaagcacacgcccatcaatcttggacgcgatctcccgcagggcttcagcgccctggagcccctcgtggacctacccattgggatcaacatcacccggttccagacgctcctggccctgcacaggagctacctgacgccgggtgatagctccagtgggtggaccgccggggctgcagcctactacgtgggctacttgcagccccggacgttcttgttgaagtacaacgagaacgggaccatcacggacgcggtggactgcgcgctcgaccctctgtcggagacgaagtgcaccctgaagtcgttcacggtggaaaaggggatctatcagacctccaacttccgggtccagccgactgagagtatcgttcggttccccaacattactaatctgtgccccttcgacgaggtgttcaacgccacgcggttcgcctccgtgtacgcctggaaccggaagcggatctcgaactgcgtggcggactactcagttttgtacaacttcgccccgttcttcgccttcaagtgctacggggtgagccccacaaaactgaacgacctctgcttcaccaacgtgtacgctgactccttcgtgatccgggggaacgaggtgagtcagatagcgcctgggcagacagggaacatcgccgactataactacaagctgcctgatgatttcacggggtgtgtcatcgcctggaacagcaacaagttggactccaaagtgggcgggaactacaactaccggtaccgcctgttccggaagtccaacttgaagccgttcgagcgggacatatccacggagatctatcaggccggcaataagccctgcaacggagtggcaggagttaattgttactttccgctgcagagctacgggttcaggcccacctacggggtggggcaccagccctaccgcgtggtggtcctgagcttcgagctgctgcacgcccccgccaccgtctgtgggcccaagaagtcgacgaacttggtgaagaacaagtgcgtcaacttcaatttcaacgggctcacaggcacgggggtgctgacggagagtaacaagaaattcctgccattccagcagttcgggcgtgatatcgcggataccaccgacgccgtgcgggacccgcagacgttggagatcctcgatatcacgccctgcagcttcgggggcgtcagtgtgatcacccccggtacaaacacctccaaccaggtggcggtgttgtaccagggggtgaattgcactgaggtccccgtggcgattcacgcggaccagctgaccccgacgtggagggtgtactcgacagggagcaacgtcttccagactcgcgctggctgcctgattggcgccgagtacgtgaactcctcgtacgagtgcgacatccccattggggcggggatctgcgcgtcgtaccagacccagacgaagtctcatcggagggcaaggtcggtggccagtcagtccatcatcgcgtacacgatgagcctgggggccgagaacagtgtcgcctatagcaacaactccatcgctatccccaccaacttcacaatcagcgtgaccaccgagatcctgccggtcagcatgaccaagacctcggtggactgcaccatgtatatctgtggggatagcaccgagtgttccaacctgctcctacagtacggctcgttctgcacgcagctgaagcgtgcactgacgggcatcgctgtggagcaggacaagaacactcaggaggtgtttgctcaggtcaagcagatctacaagacgcccccgatcaaatacttcggcggcttcaacttcagccagatcctgcctgacccgagcaagccctccaagaggtccttcatcgaggacctcctgtttaataaggtcacgctggccgacgcgggctttattaaacagtatggagactgcctgggcgacatcgcggcccgcgacctcatctgtgcgcagaagtttaatggactgactgtgctgccgcccttgctcaccgatgagatgatcgcccagtacacgtccgccctgctggcggggaccattaccagcgggtggacgttcggggctggtgcggcgctgcagatccccttcgccatgcagatggcgtaccgcttcaatgggatcggggtcacccagaacgtgctgtacgagaaccagaagctcatcgccaatcagttcaacagcgcgatcgggaagatccaggactccctgtcgagtacagcctccgcgttggggaagctgcaggacgtcgtgaatcacaatgcccaggcgctgaacacgttggtgaagcagctctcgtcgaagttcggcgcgattagtagtgtgctgaacgatattctcagtcggctggaccccccggaggcggaggtccagatagaccggctcatcactggtcgcctccagagtttgcagacgtacgtgactcagcagctcatcagagctgctgagatacgtgcgtctgcaaacctggcggcgaccaagatgagcgagtgcgtgctggggcagagcaagcgggtggatttctgcgggaagggctaccacctgatgtccttcccgcagagcgcacctcacggggtggtcttcctgcacgtgacatatgtgccggcgcaggagaagaacttcaccaccgcgccggccatatgtcacgacgggaaggcgcacttcccgcgtgagggggtcttcgtgagcaacgggacgcactggttcgtcacccagcggaacttctacgagccacagataatcaccactgacaatacctttgtcagtgggaactgcgacgtggtcatcgggatcgtcaacaacacggtgtacgacccccttcagcccgagctggactcgttcaaggaggaactggacaagtacttcaagaaccacacgagcccggatgttgacctcggagacattagcggcatcaatgcctccgtggtcaacatccagaaggagatcgacaggctcaacgaggtggccaagaacctcaacgagagcctgatcgatctccaggagctcggcaagtacgagcagtacattaagtggccatggtatatatggctggggttcatagcagggctgatcgcgatcgtgatggtcacgatcatgctctgctgtatgacctcgtgctgctcgtgcttgaagggctgctgctcgtgtggttcgtgctgcaagttcgacgaggacgactccgagccggtgctgaagggggtcaagctgcactacacctgataatctagagccgccgctccagctttgcacgtttcgatcccaaaggccctttttagggccgaccattcattgcaaaaaaaaaaaaaaaaaaaaaaaaaaaaaagcatatgactaaaaaaaaaaaaaaaaaaaaaaaaaaaaaaaaaaaaaagaagagcgtttaaacacgtgatatctggcctcatgggccttcctttcactgcccgctttccagtcgggaaacctgtcgtgccagctgcattaacatggtcatagctgtttccttgcgtattgggcgctctccgcttcctcgctcactgactcgctgcgctcggtcgttcgggtaaagcctggggtgcctaatgagcaaaaggccagcaaaaggccaggaaccgtaaaaaggccgcgttgctggcgtttttccataggctccgcccccctgacgagcatcacaaaaatcgacgctcaagtcagaggtggcgaaacccgacaggactataaagataccaggcgtttccccctggaagctccctcgtgcgctctcctgttccgaccctgccgcttaccggatacctgtccgcctttctcccttcgggaagcgtggcgctttctcatagctcacgctgtaggtatctcagttcggtgtaggtcgttcgctccaagctgggctgtgtgcacgaaccccccgttcagcccgaccgctgcgccttatccggtaactatcgtcttgagtccaacccggtaagacacgacttatcgccactggcagcagccactggtaacaggattagcagagcgaggtatgtaggcggtgctacagagttcttgaagtggtggcctaactacggctacactagaagaacagtatttggtatctgcgctctgctgaagccagttaccttcggaaaaagagttggtagctcttgatccggcaaacaaaccaccgctggtagcggtggtttttttgtttgcaagcagcagattacgcgcagaaaaaaaggatctcaagaagatcctttgatcttttctacggggtctgacgctcagtggaacgaaaactcacgttaagggattttggtcatgaatacacggtgcctgactgcgttagcaatttaactgtgataaactaccgcattaaagcttatcgatgataagctgtcaaacatgagaattcttagaaaaactcatcgagcatcaaatgaaactgcaatttattcatatcaggattatcaataccatatttttgaaaaagccgtttctgtaatgaaggagaaaactcaccgaggcagttccataggatggcaagatcctggtatcggtctgcgattccgactcgtccaacatcaatacaacctattaatttcccctcgtcaaaaataaggttatcaagtgagaaatcaccatgagtgacgactgaatccggtgagaatggcaaaagcttatgcatttctttccagacttgttcaacaggccagccattacgctcgtcatcaaaatcactcgcatcaaccaaaccgttattcattcgtgattgcgcctgagcgagacgaaatacgcgatcgctgttaaaaggacaattacaaacaggaatcgaatgcaaccggcgcaggaacactgccagcgcatcaacaatattttcacctgaatcaggatattcttctaatacctggaatgctgttttcccggggatcgcagtggtgagtaaccatgcatcatcaggagtacggataaaatgcttgatggtcggaagaggcataaattccgtcagccagtttagtctgaccatctcatctgtaacatcattggcaacgctacctttgccatgtttcagaaacaactctggcgcatcgggcttcccatacaatcgatagattgtcgcacctgattgcccgacattatcgcgagcccatttatacccatataaatcagcatccatgttggaatttaatcgcggcctcgagcaagacgtttcccgttgaatatggctcataacaccccttgtattactgtttatgtaagcagacagttttattgttcatgagcggatacatatttgaatgtatttagaaaaataaacaaataggggttccgcgcacatttccccgaaaagtgccacctaaattgtaagcgttaatattttgttaaaattcgcgttaaatttttgttaaatcagctcattttttaaccaataggccgaaatcggcaaaatcccttataaatcaaaagaatagaccgagatagggttgagtggccgctacagggcgctcccattcgccattcaggctgcgcaactgttgggaagggcgtttcggtgcgggcctcttcgctattacgccagctggcgaaagggggatgtgctgcaaggcgattaagttgggtaacgccagggttttcccagtcac

SEQ ID NO: 214 - DNA, 4487 bp, synthetic construct; identical to SEQ ID NO: 104
  source 1..4487: mol_type = other DNA

SEQ ID NO: 215 - DNA, 4321 bp, synthetic construct; identical to SEQ ID NO: 105
  source 1..4321: mol_type = other DNA

SEQ ID NO: 216 - DNA, 4568 bp, synthetic construct; identical to SEQ ID NO: 106
  source 1..4568: mol_type = other DNA

SEQ ID NO: 217 - DNA, 4157 bp, synthetic construct; identical to SEQ ID NO: 107
  source 1..4157: mol_type = other DNA

SEQ ID NO: 218 - DNA, 4442 bp, synthetic construct; identical to SEQ ID NO: 108
  source 1..4442: mol_type = other DNA

SEQ ID NO: 219 - DNA, 4445 bp, synthetic construct; identical to SEQ ID NO: 109
  source 1..4445: mol_type = other DNA

SEQ ID NO: 220 - DNA, 4406 bp, synthetic construct; identical to SEQ ID NO: 110
  source 1..4406: mol_type = other DNA

SEQ ID NO: 221 - DNA, 4752 bp, synthetic construct; identical to SEQ ID NO: 111
  source 1..4752: mol_type = other DNA

SEQ ID NO: 222 - DNA, 4943 bp, synthetic construct; identical to SEQ ID NO: 112
  source 1..4943: mol_type = other DNA

SEQ ID NO: 223 - DNA, 4650 bp, synthetic construct; identical to SEQ ID NO: 113
  source 1..4650: mol_type = other DNA

SEQ ID NO: 224 - DNA, 20 bp, synthetic construct
  source 1..20: mol_type = other DNA
aatgatacggcgaccaccga

SEQ ID NO: 225 - DNA, 20 bp, synthetic construct
  source 1..20: mol_type = other DNA
tcggtggtcgccgtatcatt

1. A recombinant ribonucleic acid (RNA) molecule comprising a 5′ untranslated region (5′ UTR), a segment that encodes a heterologous polypeptide, a 3′ untranslated region (3′ UTR), and a 3′ poly(adenosine monophosphate) (poly(A)) tail; wherein:
a) the 5′ UTR is 5′ of the segment that encodes the heterologous polypeptide;
b) the 3′ UTR is 3′ of the segment that encodes the heterologous polypeptide;
c) the 3′ poly(A) is 3′ of the 3′ UTR; and
d) i) the 5′ UTR comprises a sequence that has at least 95% identity to SEQ ID NO: 5 and the 3′ UTR comprises a sequence that has at least 95% identity to SEQ ID NO: 6;
ii) the 5′ UTR comprises a sequence that has at least 95% identity to SEQ ID NO: 7 and the 3′ UTR comprises a sequence that has at least 95% identity to SEQ ID NO: 8; or
iii) the 5′ UTR comprises a sequence that has at least 95% identity to SEQ ID NO: 13 and the 3′ UTR a sequence that has at least 95% identity to SEQ ID NO: 14.

2. The recombinant RNA molecule of claim 1, the heterologous polypeptide comprising an immunogen or an antibody against the immunogen.

3. The recombinant RNA molecule of claim 1 further comprising a 5′ cap nucleoside and a first 5′ ribonucleoside; wherein the 5′ cap nucleoside is linked 5′-to-5′ to the first 5′ ribonucleoside.

4. The recombinant RNA molecule of claim 3, wherein the first 5′ ribonucleoside comprises a 2′ methylated ribose.

5. The recombinant RNA molecule of claim 3 further comprising a linker; wherein the 5′ cap nucleoside is linked 5′-to-5′ to the first 5′ ribonucleoside by the linker.

6. The recombinant RNA molecule of claim 5, wherein the linker is a triphosphate.

7. The recombinant RNA molecule of claim 1 comprising a modified nucleotide.

8. The recombinant RNA molecule of claim 7, wherein the modified nucleotide comprises: pseudouridine, N1-methylpseudouridine, or N1-ethylpseudouridine.

9. The recombinant RNA molecule of claim 8, wherein substantially all uridines are replaced with at least one of: the pseudouridine, the N1-methylpseudouridine, and the N1-ethylpseudouridine.

10. The recombinant RNA molecule of claim 1, wherein the 3′ poly(A) comprises from 70 to 100 consecutive adenosine monophosphates.

11. The recombinant RNA molecule of claim 1, wherein the 3′ poly(A) tail comprises a 3′ segmented poly(A) tail comprising a first segment of consecutive adenosine monophosphate residues, a spacer, and a second segment of consecutive adenosine monophosphate residues and wherein the spacer comprises at least one nucleotide other than adenosine monophosphate.

12. The recombinant RNA molecule of claim 11, wherein the first segment of consecutive adenosine monophosphate residues comprises from 10 to 30 adenosine monophosphates and the second segment of consecutive adenosine monophosphate residues comprises from 70 to 100 adenosine monophosphates.

13. The recombinant RNA molecule of claim 1 comprising a sequence that has at least 95% identity to at least one of SEQ ID NOs: 32, 35, 38, 45, 48, 51, 54, 57, 60, 69, 72, 75, 82, 85, 88, 134, 138, 142, 146,150,154,158,162,166,170,174,178,182,186,190, and 194.

14. A formulation comprising lipid nanoparticles (LNPs) and recombinant RNA molecules of claim 1, wherein:
i) the LNPs comprise lipids;
ii) the lipids comprise first lipids and cholesterol;
iii) the first lipid comprises a tertiary amine and has a pKa from 5.0 to 7.6;
iv) at least half of the first lipids are neutrally charged when the first lipids are at a pH that is above the pKa; and
v) at least half of the first lipids are positively charged when the first lipids are at a pH that is below the pKa.

15. The formulation of claim 14, wherein at least 80% of the recombinant RNA molecules are encapsulated by the LNPs.

16. The formulation of claim 15, wherein the lipids further comprise polyethylene glycol-conjugated (PEG-conjugated) lipids.

17. The formulation of claim 16, wherein the PEG-conjugated lipids comprise 1,2-dimyristoyl-rac-glycerol-3-methoxypolyethylene glycol.

18. The formulation of claim 16, wherein the lipids further comprise second lipids and the second lipids comprise a neutral lipid or zwitterionic lipid.

19. The formulation of claim 18, wherein the second lipids comprise the zwitterionic lipid and the zwitterionic lipid comprises 1,2-distearoyl-sn-glycero-3-phosphocholine (DSPC).

20. (canceled)

21. A method of eliciting an immune response against an immunogen in a subject, the method comprising administering to the subject an effective amount to elicit the immune response of the formulation of claim 16, the heterologous polypeptide comprising the immunogen or an antibody against the immunogen.

22. (canceled)

23. The method of claim 21, the immune response being a therapeutic immune response.

24. (canceled)

25. The method of claim 21, the heterologous polypeptide comprising the antibody against the immunogen.

26. The method of claim 21, the heterologous polypeptide comprising the immunogen.

27. The method of claim 21, the subject being human.

28. A method of manufacturing the recombinant RNA molecule of claim 1, the method comprising admixing an RNA polymerase, triphosphate nucleotides, and a template nucleic acid comprising a sequence of the recombinant RNA molecule, thereby obtaining an admixture; the admixing being under conditions wherein the RNA polymerase produces the recombinant RNA molecule from the template nucleic acid.

29. A method of manufacturing the formulation of claim 16, the method comprising:
a. admixing the recombinant RNA molecules with an aqueous buffer, thereby obtaining an aqueous recombinant RNA solution;
b. admixing the lipids in an organic solvent, thereby obtaining a lipid solution;
c. admixing the lipid solution and the aqueous recombinant RNA solution with at least one of: a T-mixer, a microfluidics mixer, and an impinging jet mixer, thereby obtaining a first solution, wherein the first solution comprises the LNPs; and
d. purifying the LNPs to obtain the at least 80% of the recombinant RNA molecules being encapsulated by the LNPs.

30.-38. (canceled)

39. A recombinant RNA molecule comprising a first sequence or a second sequence, wherein the first sequence has at least 90% identity to SEQ ID NO: 29 and the second sequence has at least 97% identity to SEQ ID NO: 30.

40.-68. (canceled)
